(19) United States
(12) Patent Application Publication
(10) Pub. No.: US 2024/0000086 A1
(43) Pub. Date: Jan. 4, 2024

(54) PHAGE-BASED PESTICIDE AGAINST VARROA DESTRUCTOR

(71) Applicant: BEEKEEPING 101, LLC, MANSFIELD, OH (US)

(72) Inventors: Julianne H. Grose, Provo, UT (US); Gerald W. Hayes, Jr., Mansfield, OH (US)

(21) Appl. No.: 18/040,742

(22) PCT Filed: Aug. 11, 2021
(86) PCT No.: PCT/US2021/045591

§ 371 Date: Feb. 6, 2023

Related U.S. Application Data
(60) Provisional application No. 63/085,782, filed on Sep. 30, 2020.
(60) Provisional application No. 63/064,282, filed on Aug. 11, 2020.

(51) Int. Cl. A01N 63/40; A01P 7/00; A01P 1/00

(52) U.S. Cl. CPC A01N 63/40; A01P 7/00; A01P 1/00

(57) ABSTRACT

Compositions and methods for use in preserving a beehive or bees associated with the beehive against Varroa destructor infestation-induced collapse or death, or supporting the health, vitality, and longevity of a beehive or bees associated with the beehive by controlling, reducing, or eliminating a population of Varroa destructor associated with the beehive or bees associated with the beehive through targeted, phage-based, bactericidal or bacteriostatic activity against Bacillus sp., Hafnia sp., and/or Escherichia sp. present in Varroa destructor associated with the beehive or bees associated with the beehive, and specifically by applying or administering to the beehive, or to bees associated with the beehive, a composition comprising one or more bacteriophage having cellular tropism for, or infectivity specific for, Bacillus sp., Hafnia sp., and/or Escherichia sp. in Varroa destructor associated with the beehive or bees associated with the beehive.

### CROSS-REFERENCE TO RELATED APPLICATIONS

[0001] This application claims priority to and the benefit of: (i) U.S. Provisional Patent Application Ser. No. 63/064,282, filed Aug. 11, 2020, and titled “A Phage-based Therapy for Varroa Destructor Mite,” and (ii) U.S. Provisional Patent Application Ser. No. 63/085,782, filed Sep. 30, 2020, and titled “Phage-based Therapy for Varroa Destructor Mite,” the entirety of each of which is incorporated herein by specific reference.

### TECHNICAL FIELD

### Technical Field

[0002] The present disclosure relates to killing or sickening Varroa destructor associated with a beehive or honey bee colony, and particularly to compositions and methods for use in preserving a beehive or bees associated with the beehive against Varroa destructor infestation-induced collapse or death, or supporting the health, vitality, and longevity of a beehive or bees associated with the beehive by controlling, reducing, or eliminating a population of Varroa destructor associated with the beehive or bees associated with the beehive through targeted, phage-based, bactericidal or bacteriostatic activity against Bacillus sp. (e.g., Bacillus paralicheniformis), Hafnia sp. (e.g., Hafnia paralvei), and/or Escherichia sp. (e.g., Escherichia coli) present in, internal to, and/or associated with Varroa destructor that is/are associated with the beehive or with bees associated with the beehive, and specifically to compositions comprising one or more bacteriophage having cellular tropism for, or infectivity specific for Bacillus sp. (e.g., Bacillus paralicheniformis), Hafnia sp. (e.g., Hafnia paralvei), and/or Escherichia sp. (e.g., Escherichia coli) in, internal to, and/or associated with Varroa destructor that is associated with the beehive or with bees associated with the beehive, and methods of manufacturing and using the same.

### Background

[0003] More food is desperately needed for our growing world. As farms expand they contribute to climate change through the increased use of land, water, chemical treatments, and agricultural machinery, affecting crop production itself in a vicious cycle. To end this vicious cycle, advancements to minimize crop loss and maximize production are desperately needed. A key advancement in the United States (U.S.) has been the use of the Western Honey Bee (Apis mellifera) for increased pollination, contributing nearly billions to the value of U.S. crop production alone and greater than 9% to crop production across the world. In the past 15 years, dramatic honey bee losses during overwintering have been reported in the U.S. and Europe, threatening crop production.

[0004] Most honey bee experts cite Varroa destructor (the Varroa mite) as the greatest contributor to and cause of honey bee decline and of beehive colony collapse. The Varroa mite is an obligate parasite that attaches to the abdomen of the Apis cerana and Apis mellifera honey bee and primarily feeds on bee fat body tissue, spreading both viruses and bacteria to the bee colony in the process. Additionally, they create open wounds on the bees and feed on bee larvae. Left untreated, most honey bee colonies will eventually succumb to this devastating pest. Thus, the Varroa mite is the parasite with possibly the most pronounced economic impact on the beekeeping industry.

[0005] The Varroa mite is known to only reproduce in a honey bee colony. Accordingly, treatment at the point of the hive is critical. Current treatments for Varroa mite infestation include harsh chemicals that persist in the hive either in their native state or as a metabolite, harming honey bees. In addition, Varroa mites in treated colonies can become resistant to these commercial chemical pesticides over time.

[0006] Accordingly, there are a number of disadvantages associated with currently available treatment for Varroa mite infestation. A biorational option for Varroa mite treatment (i.e., a Varroa mite pesticide that causes relatively no harm to humans or animals, and does little to no damage to the environment) is desperately needed.

### SUMMARY

[0007] Embodiments of the present disclosure solve one or more of the foregoing or other problems in the art with compositions, methods, and kits for use in: (1) preserving a beehive and/or bees associated with the beehive against Varroa destructor infestation-induced collapse or death by controlling, reducing, and/or eliminating a population of Varroa destructor associated with the beehive and/or bees associated with the beehive through targeted, phage-based, bactericidal and/or bacteriostatic activity against Bacillus sp. (e.g., Bacillus paralicheniformis), Hafnia sp. (e.g., Hafnia paralvei), and/or Escherichia sp. (e.g., Escherichia coli) in, internal to, or associated with Varroa destructor that is associated with the beehive and/or with bees associated with the beehive; (2) supporting the health, vitality, and/or longevity of a beehive and/or bees associated with the beehive by controlling, reducing, and/or eliminating a population of Varroa destructor associated with the beehive and/or bees associated with the beehive through targeted, phage-based, bactericidal and/or bacteriostatic activity against Bacillus sp. (e.g., Bacillus paralicheniformis), Hafnia sp. (e.g., Hafnia paralvei), and/or Escherichia sp. (e.g., Escherichia coli) in, internal to, or associated with Varroa destructor that is associated with the beehive and/or with bees associated with the beehive; (3) controlling, reducing, and/or eliminating a population of Varroa destructor associated with a beehive and/or bees associated with the beehive through targeted, phage-based, bactericidal and/or bacteriostatic activity against Bacillus sp. (e.g., Bacillus paralicheniformis), Hafnia sp. (e.g., Hafnia paralvei), and/or Escherichia sp. (e.g., Escherichia coli) in, internal to, or associated with Varroa destructor that is associated with the beehive and/or with bees associated with the beehive; or (4) targeted, phage-based, bactericidal and/or bacteriostatic activity against Bacillus sp. (e.g., Bacillus paralicheniformis), Hafnia sp. (e.g., Hafnia paralvei), and/or Escherichia sp. (e.g., Escherichia coli) in, internal to, or associated with Varroa destructor that is associated with the beehive and/or with bees associated with the beehive. The foregoing is/are accomplished by applying or administering to the beehive, or to bees associated with the beehive, a composition that includes one or more bacteriophage having (cellular) tropism for, or infectivity specific for, Bacillus sp. (e.g., Bacillus paralicheniformis), Hafnia sp. (e.g., Hafnia paralvei), and/or Escherichia sp. (e.g., Escherichia coli) bacteria in, internal to, or associated with Varroa destructor that is associated with the beehive and/or with bees associated with the beehive.

[0008] The (internal) microbiome of the Varroa destructor mite consists of the microscopic eukarya, archaea, bacteria and viruses living in the Varroa destructor mite (e.g., internal to the Varroa destructor mite). Many of these microbes are likely required for Varroa mite health, vitality, and life, with specific strains co-evolving optimized symbiotic properties such as nutritional aids in digestion or absorption, vitamin biosynthesis, antimicrobial/antibiotic toxins (against so-called “bad bacteria”), immune modulators and even modulators of mite behavior. Specific-coevolved strains can be targeted by naturally occurring bacteriophages that are isolated, characterized, and optionally combined for therapeutic optimization. Lysis and/or death of these strains can cause sickness, sterility, and/or death in the Varroa mite through loss of one of more of the above, beneficial properties conferred upon the Varroa mite by the bacterial strains. Moreover, lysis can cause release of toxins that may affect inflammatory or other pathways in the Varroa mite, leading ultimately to sickness, sterility, and/or death in the Varroa mite.

[0009] Bacteriophages are often highly specific for the bacteria they infect, commonly distinguishing different strains of a single species of bacteria. The present disclosure presents compositions and methods for utilizing bacteriophage specificity to target key bacteria in, internal to, and/or associated with the Varroa mite. This targeting lyses and/or kills the bacteria, which may render the Varroa mite sick and/or unable to thrive and/or replicate (through the disruption of key natural microbiota in, internal to, and/or associated with the Varroa mite.

[0010] The use of bacteriophages for inhibiting, lysing, and/or killing pathogenic (or “bad”) bacteria in a host/organism, in order to support, bolster, or restore health in the target host/organism, is well known. However, embodiments of the present disclosure target beneficial bacteria that are (1) present in, internal to, and/or associated with Varroa destructor mites, an obligate parasite of and/or associated with a beehive or with bees that are associated with the beehive, and/or (2) predicted to be essential (contributors) to the health, vitality, and/or reproductive capability of the Varroa destructor, thereby (i) decreasing the health/wellness of the parasitic mite and, thereby, (ii) supporting the health of the hive, which is not the target organism of the bacteriophage. Accordingly, rather than targeting “bad” bacteria for the benefit of the host organism, embodiments of the present disclosure target “good” bacteria to the detriment of the bacterial host organism—an obligate parasite (Varroa mite) to a further, parasitic host organism. This benefits the parasitic host organism (or ecological, biological system)—a beehive and/or bees thereof—rather than the bacterial host organism.

[0011] In at least one respect, this is possible due to the fact that different host species (Varroa mite vs. honeybee) have such different microbiomes or specific microbiotic strains thereof, that bacteriophage with narrow host range are able to differentiate between (“good”) bacteria of the honey bee and (“bad”) bacteria of the Varroa mite. In other words, the beneficial Varroa destructor mite bacteria may be targeted, leaving the honey bee microbiota intact due to the divergence of these two organisms in early evolutionary history and their resulting diverse lifestyles. The Varroa destructor mite is of the class Arachnida, while the honey bee is of the class Insecta. Although the Varroa destructor mite is an obligate parasite, it feeds on the fat body of the honey bee, a discrete body separate from the digestive system. Accordingly, bacteria from the Varroa destructor mite were isolated and compared with bacteria known to be the key beneficial bacteria to honey bee health, and those species in common were not utilized to ensure target specificity. For example, three of the bacteriophages isolated and utilized in the present disclosure are highly unique, showing only distant homology to any reported phages in the NCBI GenBank database.

[0012] Accordingly, the present disclosure relates to killing or sickening Varroa destructor associated with a beehive or honey bee colony, and particularly to compositions and methods for use in preserving a beehive or bees associated with the beehive against Varroa destructor infestation-induced collapse or death, or supporting the health, vitality, and longevity of a beehive or bees associated with the beehive by controlling, reducing, or eliminating a population of Varroa destructor associated with the beehive or bees associated with the beehive through targeted, phage-based, bactericidal or bacteriostatic activity against Bacillus sp. (e.g., Bacillus paralicheniformis), Hafnia sp. (e.g., Hafnia paralvei), and/or Escherichia sp. (e.g., Escherichia coli) present in, internal to, and/or associated with Varroa destructor that are associated with the beehive or with bees associated with the beehive, and specifically to compositions comprising one or more bacteriophage having cellular tropism for, or infectivity specific for, Bacillus sp. (e.g., Bacillus paralicheniformis), Hafnia sp. (e.g., Hafnia paralvei), and/or Escherichia sp. (e.g., Escherichia coli) in, internal to, and/or associated with Varroa destructor that is associated with the beehive or with bees associated with the beehive, and methods of manufacturing and using the same.

[0013] Aspects of the present disclosure, or the invention disclosed, recited, and/or claimed therein, include, comprise, and/or relate to compositions, methods, and kits for direct, phage-facilitated targeting of, or targeted, phage-based, bactericidal and/or bacteriostatic activity against Bacillus sp. (e.g., Bacillus paralicheniformis), Hafnia sp. (e.g., Hafnia paralvei), and/or Escherichia sp. (e.g., Escherichia coli) in, internal to, and/or associated with Varroa destructor that is associated with the beehive or with bees associated with the beehive, preferably for controlling, reducing, and/or eliminating a population of Varroa destructor associated with the beehive and/or bees associated with the beehive, more preferably for supporting the health, vitality, and/or longevity of the beehive and/or bees associated with the beehive and/or preserving the beehive and/or bees associated with the beehive against Varroa destructor infestation-induced collapse or death.

[0014] Illustrative compositions and kits comprise novel bacteriophage(s), bacteriophage cocktail(s), and/or bacteriophage formulation(s). The bacteriophage of the inventive compositions have (cellular) tropism for and/or infectivity specific for Bacillus sp. (e.g., Bacillus paralicheniformis), Hafnia sp. (e.g., Hafnia paralvei), and/or Escherichia sp. (e.g., Escherichia coli) in, internal to, and/or associated with Varroa destructor that is associated with the beehive or with bees associated with the beehive.

[0015] Illustrative (therapeutic and/or treatment) methods can comprise applying or administering to applying or administering to a beehive having Varroa destructor infestation, or to bees associated with the beehive, a composition that includes one or more bacteriophage having (cellular) tropism for, or infectivity specific for, Bacillus sp. (e.g., Bacillus paralicheniformis), Hafnia sp. (e.g., Hafnia paralvei), and/or Escherichia sp. (e.g., Escherichia coli) bacteria in, internal to, and/or associated with Varroa destructor that is associated with the beehive or with bees associated with the beehive. Illustrative methods can comprise infecting the Varroa destructor associated with the beehive and/or bees associated with the beehive with one or more of the bacteriophage by applying or administering the composition to the beehive or to bees associated with the beehive. Mechanistically, but without being bound to any particular theory, Bacillus sp. (e.g., Bacillus paralicheniformis), Hafnia sp. (e.g., Hafnia paralvei), and/or Escherichia sp. (e.g., Escherichia coli) in, internal to, and/or associated with Varroa destructor that is associated with the beehive and/or with bees associated with the beehive can support the health, vitality, and/or reproduction of the Varroa destructor. Targeted, phage-based or phage-facilitated bactericidal and/or bacteriostatic activity against the Bacillus sp. (e.g., Bacillus paralicheniformis), Hafnia sp. (e.g., Hafnia paralvei), and/or Escherichia sp. (e.g., Escherichia co/i) in, internal to, and/or associated with Varroa destructor that is associated with the beehive and/or with bees associated with the beehive can control, reduce, and/or eliminate a population of the Varroa destructor associated with a beehive and/or bees associated with the beehive, thereby supporting the health, vitality, and/or longevity of the beehive and/or bees associated with the beehive and/or preserving the beehive and/or bees associated with the beehive against Varroa destructor infestation-induced collapse or death. Specifically, phage-induced death or lysis of the Bacillus sp. (e.g., Bacillus paralicheniformis), Hafnia sp. (e.g., Hafnia paralvei), and/or Escherichia sp. (e.g., Escherichia coli) in, internal to, and/or associated with Varroa destructor that is associated with the beehive and/or with bees associated with the beehive can result in death, growth or maturation cessation, and/or reproductive sterility of the Varroa destructor associated with a beehive and/or bees associated with the beehive, thereby controlling, reducing, and/or eliminating a population of the Varroa destructor associated with a beehive and/or bees associated with the beehive, which benefits, enhances, and/or supports the health, vitality, and/or longevity of the beehive and/or bees associated with the beehive, thereby preserving the beehive and/or bees associated with the beehive against Varroa destructor infestation-induced collapse or death.

[0016] Accordingly, aspects of the present disclosure, or the invention disclosed, recited, and/or claimed therein, include, comprise, and/or relate to compositions, methods, and kits for targeted “Varroacidal” and/or “Varroastatic” treatment of a beehive and/or bees associated with the beehive, through targeted, phage-based, bactericidal and/or bacteriostatic treatment against Bacillus sp. (e.g., Bacillus paralicheniformis) Hafnia sp. (e.g., Hafnia paralvei), and/or Escherichia sp. (e.g., Escherichia coli) in, internal to, and/or associated with Varroa destructor that is associated with the beehive and/or with bees associated with the beehive.

[0017] Thus, embodiment of the present disclosure include product(s) and/or method(s) that provide a natural, organic, sustainable, “green”, and/or biorational option for or alternative to traditional (chemical) Varroa mite treatment.

[0018] In a first (or at least a first) aspect, embodiments of the present disclosure include composition(s) for use in treating Varroa destructor infestation in a beehive having Varroa destructor infestation.

[0019] Illustrative composition(s) of the present disclosure include one or more bacteriophage having a genome with a nucleic acid sequence selected from the group consisting of: SEQ ID NO. 1 through SEQ ID NO. 13, or having a genome with at least 70% sequence identity to one of SEQ ID NO. 1 through SEQ ID NO. 13, wherein each of the one or more bacteriophage has (a respective) specificity or cellular tropism for one or more strain of Bacillus sp. (e.g., Bacillus paralicheniformis), one or more strain of Hafnia sp., (e.g., Hafnia paralvei), or one or more strain of Escherichia sp. (e.g., Escherichia coli) present in, internal to, and/or associated with Varroa destructor that is associated with the beehive and/or the bees associated with the beehive. Illustrative composition(s) of the present disclosure further include a carrier or excipient (in which the one or more bacteriophage is/are disposed, carried, and/or contained).

[0020] In some embodiments, the composition includes two or more, preferably three or more, more preferably four or more, still more preferably five or more, still more preferably six or more, still more preferably seven or more, still more preferably eight or more, still more preferably nine or more, still more preferably ten or more, still more preferably eleven or more, still more preferably twelve or more, most preferably thirteen bacteriophage having respective genomes with respective nucleic acid sequences selected from the group consisting of SEQ ID NO. 1 through SEQ ID NO. 13.

[0021] In some embodiments, (each of) the (two or more, three or more, four or more, five or more, six or more, seven or more, eight or more, nine or more, ten or more, eleven or more, twelve or more, or thirteen) bacteriophage(s) have or comprise, compared to other bacteriophage in the composition (i) different host cell receptor specificity for attachment and/or (ii) less than or equal to 99% genomic sequence identity, preferably less than or equal to 98% genomic sequence identity, more preferably less than or equal to 97% genomic sequence identity, still more preferably less than or equal to 96% genomic sequence identity, still more preferably less than or equal to 95% genomic sequence identity, still more preferably less than or equal to 94% genomic sequence identity, still more preferably less than or equal to 93% genomic sequence identity, still more preferably less than or equal to 92% genomic sequence identity, still more preferably less than or equal to 91% genomic sequence identity, still more preferably less than or equal to 90% genomic sequence identity, still more preferably less than or equal to 89% genomic sequence identity, still more preferably less than or equal to 88% genomic sequence identity, still more preferably less than or equal to 87% genomic sequence identity, still more preferably less than or equal to 86% genomic sequence identity, still more preferably less than or equal to 85% genomic sequence identity, still more preferably less than or equal to 84% genomic sequence identity, still more preferably less than or equal to 83% genomic sequence identity, still more preferably less than or equal to 82% genomic sequence identity, still more preferably less than or equal to 81% genomic sequence identity, still more preferably less than or equal to 80% genomic sequence identity.

[0022] In some embodiments, (each of) the (one or more, two or more, three or more, four or more, five or more, six or more, seven or more, eight or more, nine or more, ten or more, eleven or more, twelve or more, or thirteen) bacteriophage(s) has a genome with a nucleic acid sequence having at least 75% sequence identity, preferably at least 78% sequence identity, more preferably at least 80% sequence identity, still more preferably at least 82% sequence identity, still more preferably at least 85% sequence identity, still more preferably at least 88% sequence identity, still more preferably at least 90% sequence identity, still more preferably at least 91% sequence identity, still more preferably at least 92% sequence identity, still more preferably at least 93% sequence identity, still more preferably at least 94% sequence identity, still more preferably at least 95% sequence identity, still more preferably at least 96% sequence identity, still more preferably at least 97% sequence identity, still more preferably at least 98% sequence identity, still more preferably at least 99% sequence identity to one of SEQ ID NO. 1 through SEQ ID NO. 13.

[0023] In some embodiments, (each of) the (one or more, two or more, three or more, four or more, five or more, six or more, seven or more, eight or more, nine or more, ten or more, eleven or more, twelve or more, or thirteen) bacteriophage(s) is/are present in the composition at greater than or equal to about 1×10⁴ plaque forming units per milliliter (PFU/mL) of the composition or greater than or equal to about 1×10⁴ PFU per milligram (PFU/mg) of the composition, preferably greater than or equal to about 1×10⁵ plaque forming units per milliliter PFU/mL of the composition or greater than or equal to about 1×10⁵ PFU/mg of the composition, more preferably greater than or equal to about 1×10⁶ PFU/mL of the composition or greater than or equal to about 1×10⁶ PFU/mg of the composition, still more preferably greater than or equal to about 1×10⁷ PFU/mL of the composition or greater than or equal to about 1×10⁷ PFU/mg of the composition, still more preferably greater than or equal to about 1×10⁸ PFU/mL of the composition or greater than or equal to about 1×10⁸ PFU/mg of the composition, still more preferably greater than or equal to about 1×10⁹ PFU/mL of the composition or greater than or equal to about 1×10⁹ PFU/mg of the composition, still more preferably greater than or equal to about 1×10¹⁰ PFU/mL of the composition or greater than or equal to about 1×10¹⁰ PFU/mg of the composition, still more preferably greater than or equal to about 1×10¹¹ PFU/mL of the composition or greater than or equal to about 1×10¹¹ PFU/mg of the composition, still more preferably greater than or equal to about 1×10¹² PFU/mL of the composition or greater than or equal to about 1×10¹² PFU/mg of the composition.

[0024] In some embodiments, (each of) the (one or more, two or more, three or more, four or more, five or more, six or more, seven or more, eight or more, nine or more, ten or more, eleven or more, twelve or more, or thirteen) bacteriophage(s) is/are lytic and/or has lytic activity against the one or more strain of Bacillus sp. (e.g., Bacillus paralicheniformis), one or more strain of Hafnia sp., (e.g., Hafnia paralvei) and/or one or more strain of Escherichia sp. (e.g., Escherichia coil) present in, internal to, and/or associated with Varroa destructor that is associated with the beehive and/or with the bees associated with the beehive.

[0025] In some embodiments, (each of) the (one or more, two or more, three or more, four or more, five or more, six or more, seven or more, eight or more, nine or more, ten or more, eleven or more, twelve or more, or thirteen) bacteriophage(s) is/are not lysogenic and/or does not have lysogenic activity against the one or more strain of Bacillus sp. (e.g., Bacillus paralicheniformis), the one or more strain of Hafnia sp., (e.g., Hafnia paralvei), and/or the one or more strain of Escherichia sp. (e.g., Escherichia coli) present in, internal to, and/or associated with Varroa destructor that is associated with the beehive and/or with the bees associated with the beehive.

[0026] In some embodiments, applying or administering the composition to a beehive having Varroa destructor infestation, or to bees associated with the beehive, is effective to: (1) cause bacteriophage-induced death or lysis of one or more strain of Bacillus sp. (e.g., Bacillus paralicheniformis), one or more strain of Hafnia sp., (e.g., Hafnia paralvei), or one or more strain of Escherichia sp. (e.g., Escherichia coli) present in, internal to, and/or associated with Varroa destructor that is associated with the beehive and/or with the bees associated with the beehive; (2) cause death of Varroa destructor associated with the beehive and/or the bees; and/or (3) inhibit reproduction, maturation, and/or growth in Varroa destructor or a population of Varroa destructor associated with the beehive and/or the bees.

[0027] In some embodiments, the composition includes a mixture or cocktail of bacteriophages (i.e., a bacteriophage cocktail), including two or more sets of bacteriophage(s), selected from the group consisting of: (i) a first set of bacteriophage that includes one or more bacteriophage, each having a genome with a nucleic acid sequence selected from the group consisting of SEQ ID NO. 1 through SEQ ID NO. 5, or having at least 70% sequence identity to one of SEQ ID NO. 1 through SEQ ID NO. 5, wherein each bacteriophage in the first set has specificity or cellular tropism for at least one strain of Bacillus sp. (e.g., Bacillus paralicheniformis); (ii) a second set of bacteriophage that includes one or more bacteriophage, each having a genome with a nucleic acid sequence selected from the group consisting of SEQ ID NO. 6 through SEQ ID NO. 9, or having at least 70% sequence identity to one of SEQ ID NO. 6 through SEQ ID NO. 9, wherein each bacteriophage in the second set has specificity or cellular tropism for at least one strain of Hafnia sp. (e.g., Hafnia paralvei); and/or (iii) a third set of bacteriophage that includes one or more bacteriophage, each having a genome with a nucleic acid sequence selected from the group consisting of SEQ ID NO. 10 through SEQ ID NO. 13, or having at least 70% sequence identity to one of SEQ ID NO. 10 through SEQ ID NO. 13, wherein each bacteriophage in the third set has specificity or cellular tropism for at least one strain of Escherichia sp. (e.g., Escherichia coli).

[0028] In some embodiments, the first set of bacteriophage can include two or more bacteriophage, preferably three or more bacteriophage, more preferably four or more bacteriophage, each having a genome with a nucleic acid sequence selected from the group consisting of SEQ ID NO. 1 through SEQ ID NO. 5, or having at least 70% sequence identity to one of SEQ ID NO. 1 through SEQ ID NO. 5, wherein each bacteriophage in the first set has specificity or cellular tropism for at least one strain of Bacillus sp. (e.g., Bacillus paralicheniformis).

[0029] In some embodiments, the second set of bacteriophage can include two or more bacteriophage, preferably three or more bacteriophage, more preferably four or more bacteriophage, each having a genome with a nucleic acid sequence selected from the group consisting of SEQ ID NO. 6 through SEQ ID NO. 9, or having at least 70% sequence identity to one of SEQ ID NO. 6 through SEQ ID NO. 9, wherein each bacteriophage in the second set has specificity or cellular tropism for at least one strain of Hafnia sp. (e.g., Hafnia paralvei)

[0030] In some embodiments, the third set of bacteriophage can include two or more bacteriophage, preferably three or more bacteriophage, more preferably four or more bacteriophage, each having a genome with a nucleic acid sequence selected from the group consisting of SEQ ID NO. 10 through SEQ ID NO. 13, or having at least 70% sequence identity to one of SEQ ID NO. 10 through SEQ ID NO. 13, wherein each bacteriophage in the third set has specificity or cellular tropism for at least one strain of Escherichia sp. (e.g., Escherichia coli).

[0031] In some embodiments, (each of) the (one or more, two or more, three or more, or four or more) bacteriophage(s) in the first set of bacteriophage has a genome with a nucleic acid sequence having at least 75% sequence identity, preferably at least 78% sequence identity, more preferably at least 80% sequence identity, still more preferably at least 82% sequence identity, still more preferably at least 85% sequence identity, still more preferably at least 88% sequence identity, still more preferably at least 90% sequence identity, still more preferably at least 91% sequence identity, still more preferably at least 92% sequence identity, still more preferably at least 93% sequence identity, still more preferably at least 94% sequence identity, still more preferably at least 95% sequence identity, still more preferably at least 96% sequence identity, still more preferably at least 97% sequence identity, still more preferably at least 98% sequence identity, still more preferably at least 99% sequence identity to one of SEQ ID NO. 1 through SEQ ID NO.

[0032] In some embodiments, (each of) the (one or more, two or more, three or more, or four or 30 more) bacteriophage(s) in the second set of bacteriophage has a genome with a nucleic acid sequence having at least 75% sequence identity, preferably at least 78% sequence identity, more preferably at least 80% sequence identity, still more preferably at least 82% sequence identity, still more preferably at least 85% sequence identity, still more preferably at least 88% sequence identity, still more preferably at least 90% sequence identity, still more preferably at least 91% sequence identity, still more preferably at least 92% sequence identity, still more preferably at least 93% sequence identity, still more preferably at least 94% sequence identity, still more preferably at least 95% sequence identity, still more preferably at least 96% sequence identity, still more preferably at least 97% sequence identity, still more preferably at least 98% sequence identity, still more preferably at least 99% sequence identity to one of SEQ ID NO. 6 through SEQ ID NO. 9.

[0033] In some embodiments, (each of) the (one or more, two or more, three or more, or four or more) bacteriophage(s) in the third set of bacteriophage has a genome with a nucleic acid sequence having at least 75% sequence identity, preferably at least 78% sequence identity, more preferably at least 80% sequence identity, still more preferably at least 82% sequence identity, still more preferably at least 85% sequence identity, still more preferably at least 88% sequence identity, still more preferably at least 90% sequence identity, still more preferably at least 91% sequence identity, still more preferably at least 92% sequence identity, still more preferably at least 93% sequence identity, still more preferably at least 94% sequence identity, still more preferably at least 95% sequence identity, still more preferably at least 96% sequence identity, still more preferably at least 97% sequence identity, still more preferably at least 98% sequence identity, still more preferably at least 99% sequence identity to one of SEQ ID NO. 10 through SEQ ID NO. 13.

[0034] In some embodiments, (each of) the (one or more, two or more, three or more, or four or more) bacteriophage(s) in each of the first set of bacteriophage, the second set of bacteriophage, and the third set of bacteriophage is/are present in the composition at greater than or equal to about 1×10⁴ plaque forming units per milliliter (PFU/mL) of the composition or greater than or equal to about 1×10⁴ PFU per milligram (PFU/mg) of the composition, preferably greater than or equal to about 1×10⁵ plaque forming units per milliliter PFU/mL of the composition or greater than or equal to about 1×10⁵ PFU/mg of the composition, more preferably greater than or equal to about 1×10⁶ PFU/mL of the composition or greater than or equal to about 1×10⁶ PFU/mg of the composition, still more preferably greater than or equal to about 1×10⁷ PFU/mL of the composition or greater than or equal to about 1×10⁷ PFU/mg of the composition, still more preferably greater than or equal to about 1×10⁸ PFU/mL of the composition or greater than or equal to about 1×10⁸ PFU/mg of the composition, still more preferably greater than or equal to about 1×10⁹ PFU/mL of the composition or greater than or equal to about 1×10⁹ PFU/mg of the composition, still more preferably greater than or equal to about 1×10¹⁰ PFU/mL of the composition or greater than or equal to about 1×10¹⁰ PFU/mg of the composition, still more preferably greater than or equal to about 1×10¹¹ PFU/mL of the composition or greater than or equal to about 1×10¹¹ PFU/mg of the composition, still more preferably greater than or equal to about 1×10¹² PFU/mL of the composition or greater than or equal to about 1×10¹² PFU/mg of the composition.

[0035] In some embodiments, (each of) the (one or more, two or more, three or more, or four or more) bacteriophage(s), or the respective bacteriophage(s), in each of the first set of bacteriophage, the second set of bacteriophage, and the third set of bacteriophage is/are (respectively or each) lytic and/or have lytic activity against the one or more strain of Bacillus sp. (e.g., Bacillus paralicheniformis), the one or more strain of Hafnia sp. (e.g., Hafnia paralvel), and the one or more strain of Escherichia sp. (e.g., Escherichia coli), respectively.

[0036] In some embodiments, (each of) the (one or more, two or more, three or more, or four or more) bacteriophage(s), or the respective bacteriophage(s), in each of the first set of bacteriophage, the second set of bacteriophage, and the third set of bacteriophage is/are (respectively or each) not lysogenic and/or do not have lysogenic activity against the one or more strain of Bacillus sp. (e.g., Bacillus paralicheniformis), the one or more strain of Hafnia sp. (e.g., Hafnia paralvei), and the one or more strain of Escherichia sp. (e.g., Escherichia coli), respectively.

[0037] In some embodiments, the mixture or cocktail of bacteriophages (i.e., a bacteriophage cocktail), includes the first set of bacteriophage, the second set of bacteriophage, and the third set of bacteriophage.

[0038] In some embodiments, the (respective) bacteriophage(s) of the first set of bacteriophage each have or comprise, compared to other bacteriophage in the first set (i) different host cell receptor specificity for attachment and/or (ii) less than or equal to 99% genomic sequence identity, preferably less than or equal to 98% genomic sequence identity, more preferably less than or equal to 97% genomic sequence identity, still more preferably less than or equal to 96% genomic sequence identity, still more preferably less than or equal to 95% genomic sequence identity, still more preferably less than or equal to 94% genomic sequence identity, still more preferably less than or equal to 93% genomic sequence identity, still more preferably less than or equal to 92% genomic sequence identity, still more preferably less than or equal to 91% genomic sequence identity, still more preferably less than or equal to 90% genomic sequence identity, still more preferably less than or equal to 89% genomic sequence identity, still more preferably less than or equal to 88% genomic sequence identity, still more preferably less than or equal to 87% genomic sequence identity, still more preferably less than or equal to 86% genomic sequence identity, still more preferably less than or equal to 85% genomic sequence identity, still more preferably less than or equal to 84% genomic sequence identity, still more preferably less than or equal to 83% genomic sequence identity, still more preferably less than or equal to 82% genomic sequence identity, still more preferably less than or equal to 81% genomic sequence identity, still more preferably less than or equal to 80% genomic sequence identity.

[0039] In some embodiments, the (respective) bacteriophage(s) of the second set of bacteriophage each have or comprise, compared to other bacteriophage in the second set (i) different host cell receptor specificity for attachment and/or (ii) less than or equal to 99% genomic sequence identity, preferably less than or equal to 98% genomic sequence identity, more preferably less than or equal to 97% genomic sequence identity, still more preferably less than or equal to 96% genomic sequence identity, still more preferably less than or equal to 95% genomic sequence identity, still more preferably less than or equal to 94% genomic sequence identity, still more preferably less than or equal to 93% genomic sequence identity, still more preferably less than or equal to 92% genomic sequence identity, still more preferably less than or equal to 91% genomic sequence identity, still more preferably less than or equal to 90% genomic sequence identity, still more preferably less than or equal to 89% genomic sequence identity, still more preferably less than or equal to 88% genomic sequence identity, still more preferably less than or equal to 87% genomic sequence identity, still more preferably less than or equal to 86% genomic sequence identity, still more preferably less than or equal to 85% genomic sequence identity, still more preferably less than or equal to 84% genomic sequence identity, still more preferably less than or equal to 83% genomic sequence identity, still more preferably less than or equal to 82% genomic sequence identity, still more preferably less than or equal to 81% genomic sequence identity, still more preferably less than or equal to 80% genomic sequence identity.

[0040] In some embodiments, the (respective) bacteriophage(s) of the third set of bacteriophage each have or comprise, compared to other bacteriophage in the third set (i) different host cell receptor specificity for attachment and/or (ii) less than or equal to 99% genomic sequence identity, preferably less than or equal to 98% genomic sequence identity, more preferably less than or equal to 97% genomic sequence identity, still more preferably less than or equal to 96% genomic sequence identity, still more preferably less than or equal to 95% genomic sequence identity, still more preferably less than or equal to 94% genomic sequence identity, still more preferably less than or equal to 93% genomic sequence identity, still more preferably less than or equal to 92% genomic sequence identity, still more preferably less than or equal to 91% genomic sequence identity, still more preferably less than or equal to 90% genomic sequence identity, still more preferably less than or equal to 89% genomic sequence identity, still more preferably less than or equal to 88% genomic sequence identity, still more preferably less than or equal to 87% genomic sequence identity, still more preferably less than or equal to 86% genomic sequence identity, still more preferably less than or equal to 85% genomic sequence identity, still more preferably less than or equal to 84% genomic sequence identity, still more preferably less than or equal to 83% genomic sequence identity, still more preferably less than or equal to 82% genomic sequence identity, still more preferably less than or equal to 81% genomic sequence identity, still more preferably less than or equal to 80% genomic sequence identity.

[0041] In some embodiments, applying or administering the phage cocktail-containing composition to a beehive having Varroa destructor infestation, or to bees associated with the beehive, is effective to: (1) cause bacteriophage-induced death or lysis of one or more strain of Bacillus sp. (e.g., Bacillus paralicheniformis) and/or one or more strain of Hafnia sp. (e.g., Hafnia paralvei) and/or one or more strain of Escherichia sp. (e.g., Escherichia coli) present in, internal to, and/or associated with Varroa destructor that is associated with the beehive and/or with the bees associated with the beehive; (2) cause death of Varroa destructor associated with the beehive and/or the bees; and/or (3) inhibit reproduction, maturation, and/or growth in Varroa destructor or a population of Varroa destructor associated with the beehive and/or the bees.

[0042] In one or more of the various embodiments, the carrier or excipient can comprise suitable components, as known in the art. Illustratively, the carrier or excipient can comprise water or suitable liquid base.

[0043] Illustratively, the carrier or excipient can comprise a buffer or buffering agent (in water). Illustratively, the carrier or excipient can comprise a buffered solution (e.g., buffering agent(s) in water). Buffering agents can be suitable for buffering the composition (in liquid/water) at any suitable pH (e.g., greater than, less than, equal to, between, and/or about pH 6.5, 6.6, 6.7, 6.8, 6.9, 7.0, 7.1, 72, 7.3, 7.4, 7.5, 7.6, 0.7.7, 7.8, 7.9, 8.0, 8.1, 8.2, 8.3, 8.4, or 8.5). Illustratively, the buffering agent can be or comprise a sodium phosphate buffer (in water). In some embodiments, the buffer can be or comprise (greater than or equal to) about 25 mM, 50 mM, 100 mM 150 mM, or 200 mM sodium phosphate buffer (pH 7.0-7.9). In some embodiments, the buffer or buffering agent can be or comprise (greater than or equal to) about 50 mM sodium phosphate buffer (pH ˜7.4).

[0044] In at least one embodiment, the carrier or excipient can be or compose SM buffer (in water), as known in the art.

[0045] Illustratively, the carrier or excipient can comprise one or more salts. In some embodiments, the salt(s) can be or comprise NaCl (or CaCl, MgCl, KCl), or corresponding or other anion/cation salt combination, as known in the art and suitable for bee/beehive applications. In some embodiments, the salt(s) (e.g., NaCl) can be included in the composition (or carrier or excipient thereof) at a concentration of greater than, less than, equal to, between, and/or about 1 g/L, 2 g/L, 3 g/L, 4 g/L, 4.5 g/L, 5 g/L, 5.1 g/L, 5.2 g/L, 5.3 g/L, 5.4 g/L, 5.5 g/L, 5.6 g/L, 5.7 g/L, g/L, 5.9 g/L, 6.0 g/L, 6.5 g/L, 7 g/L, etc. or greater than, less than, equal to, between, and/or about 50 mM, 60 mM, 70 mM, 75 mM, 80 mM, 85 mM, 90 mM, 95 mM, 100 mM, 105 mM, 110 mM, 115 mM, 120 mM, 125 mM, 130 mM, 140 mM, 150 mM, etc. In some embodiments, the salt can be or comprise (greater than or equal to) about 5.8 g/L NaCl (or (greater than or equal to) about 100 mM).

[0046] Alternatively, or in addition, the salt can be or comprise MgSO4 (e.g., MgSO4·7H2O) or a corresponding or other anion/cation salt combination, as known in the art and suitable for bee/beehive applications. In some embodiments, the salt(s) (e.g., NaCl) can be included in the composition (or carrier or excipient thereof) at a concentration of greater than, less than, equal to, between, and/or about 0.1 g/L, 0.25 g/L, 0.5 g/L, 1 g/L, 1.1 g/L, 1.2 g/L, 1.3 g/L, 1.4 g/L, 1.5 g/L, 1.6 g/L, 1.7 g/L, 1.8 g/L, 1.9 g/L, 2.0 g/L, 2.1 g/L, 2.2 g/L, 2.3 g/L, 2.4 g/L, 2.5 g/L, 2.6 g/L, 2.7 g/L, 2.8 g/L, 2.9 g/L, 3.0 g/L, 3.5 g/L, 4 g/L, etc., or greater than, less than, equal to, between, and/or about 0.5 mM, 1 mM, 2 mM, 3 mM, 4 mM, 5 mM, 6 mM, 7 mM, 7.5 mM, 8 mM, 8.5 mM, 9 mM, 11 mM, 12 mM, 13 mM, 14 mM, 15 mM, etc. In some embodiments, the salt can be or comprise (greater than or equal to) about 2 g/L MgSO4·7H2O (or (greater than or equal to) about 8 mM).

[0047] Illustratively, the carrier or excipient can comprise one or more peptides.

[0048] Illustratively, the carrier or excipient can comprise a yeast extract.

[0049] Illustratively, the carrier or excipient can be or comprise greater than or equal to about 50 mM sodium phosphate buffer (pH 7.4), 5.8 g/L NaCL (100 mM final), 2 g/L MgSO4·7H2O (8 mM final).

[0050] In a second (or at least a second) aspect, embodiments of the present disclosure include a kit.

[0051] In some embodiments, the kit can include two or more compositions in accordance with any of the embodiment of the first aspect of the present disclosure. Illustratively, certain compositions of the present disclosure may be optimal or more effective for spring, summer, fall, or winter applications or treatments, or any combination thereof, than certain other compositions of the present disclosure. For instance, one or more illustrative compositions may be optimal for spring applications or treatments, summer applications or treatments, spring/summer applications or treatments, fall applications or treatments, spring/fall applications or treatments, summer/fall applications or treatments, winter applications or treatments, winter/spring applications or treatments, or fall/winter applications or treatments.

[0052] In some embodiments, the kit can include one or more compositions in accordance with any of the embodiment of the first aspect of the present disclosure, and one or more probiotic compositions (aimed at improving bee and/or hive health). The probiotic composition(s) of the present disclosure can include one or more (or a cocktail of) probiotic bacteria know to support and/or improve bee and/or hive health. Illustrative probiotic bacteria can support and/or improve digestion, nutrient absorption, and/or overall health and wellness in the bees. Such probiotic bacteria will be apparent or known to those skilled in the art.

[0053] In a third aspect, embodiments of the present disclosure include a method of treating Varroa destructor infestation in a beehive.

[0054] In some embodiments, the method can involve or include the step of applying or administering to a beehive having Varroa destructor infestation, or to bees associated with the beehive, a composition in accordance with any of the embodiment of the first aspect of the present disclosure.

[0055] In some embodiments, the method can involve or include the step of applying or administering to a beehive having Varroa destructor infestation, or to bees associated with the beehive, two or more of the compositions according to any of the embodiment of the first aspect of the present disclosure.

[0056] In some embodiments, the method can involve or include the step of applying or administering to a beehive having Varroa destructor infestation, or to bees associated with the beehive, compositions included in a kit in accordance with any of the embodiment of the second aspect of the present disclosure.

[0057] In some embodiments, the method can involve or include the step of applying or administering to a beehive having Varroa destructor infestation, or to bees associated with the beehive, a composition that includes (i) one or more bacteriophage having specificity or cellular tropism for one or more strain of Bacillus sp. (e.g., Bacillus paralicheniformis), one or more strain of Hafnia sp. (e.g., Hafnia paralvel), or one or more strain of Escherichia sp. (e.g., Escherichia coli) present in, internal to, and/or associated with Varroa destructor that is associated with the beehive and/or with the bees associated with the beehive, and (ii) a carrier or excipient (in which the one or more bacteriophage is/are disposed, carried, and/or contained).

[0058] In some embodiments, the composition comprises two or more bacteriophage, preferably three or more bacteriophage, more preferably four or more bacteriophage, still more preferably five or more bacteriophage, still more preferably six or more bacteriophage, still more preferably seven or more bacteriophage, still more preferably eight or more bacteriophage, still more preferably nine or more bacteriophage, still more preferably ten or more bacteriophage, still more preferably eleven or more bacteriophage, still more preferably twelve or more bacteriophage, most preferably thirteen bacteriophage, each having specificity or cellular tropism for one or more strain of bacteria selected from the group consisting of Bacillus sp. (e.g., Bacillus paralicheniformis), Hafnia sp. (e.g., Hafnia paralvei), and Escherichia sp. (e.g., Escherichia coli) present in, internal to, and/or associated with Varroa destructor that is associated with the beehive and/or with the bees associated with the beehive.

[0059] In some embodiments, the composition comprises: (i) a first bacteriophage having specificity or cellular tropism for Bacillus sp. (e.g., Bacillus paralicheniformis); (ii) a second bacteriophage having specificity or cellular tropism for Hafnia sp. (e.g., Hafnia paralvei); and (iii) a third bacteriophage having specificity or cellular tropism for Escherichia sp. (e.g., Escherichia coli).

[0060] In some embodiments, the composition comprises: (i) a first set of bacteriophage comprising two or more bacteriophage, preferably three or more bacteriophage, more preferably four or more bacteriophage, each having specificity or cellular tropism for Bacillus sp. (e.g., Bacillus paralicheniformis); (ii) a second set of bacteriophage comprising two or more bacteriophage, preferably three or more bacteriophage, more preferably four or more bacteriophage, each having specificity or cellular tropism for Hafnia sp. (e.g., Hafnia paralvei); and/or (iii) a third set of bacteriophage comprising two or more bacteriophage, preferably three or more bacteriophage, more preferably four or more bacteriophage, each having specificity or cellular tropism for Escherichia sp. (e.g., Escherichia coli).

[0061] In some embodiments, the step of applying or administering any of the foregoing and/or disclosed composition to the beehive, or to the bees associated with the beehive, can include or involve delivering (applying or administering) the composition to the beehive once or twice a week by one or more (e.g., several) delivery methods including or selected from the group consisting of: ultralow volume fogging or surface acoustic wave nebulization of a liquid or other suitable sample, (air-based or airless) delivery of a lyophilized power or liquid substance set into the beehive, which delivers the bacteriophages through a combination of bee movement and/or evaporation throughout the hive, and so forth.

[0062] In some embodiments, the step of applying or administering any of the foregoing and/or disclosed composition to the beehive, or to the bees associated with the beehive, is effective to: (1) cause bacteriophage-induced death or lysis of one or more strain of Bacillus sp. (e.g., Bacillus paralicheniformis), and/or one or more strain of Hafnia sp. (e.g., Hafnia paralvei) and/or one or more strain of Escherichia sp. (e.g., Escherichia coli) present in, internal to, and/or associated with Varroa destructor that is associated with the beehive and/or with the bees associated with the beehive; (2) cause death of Varroa destructor associated with the beehive and/or the bees; and/or (3) inhibit reproduction, maturation, and/or growth in Varroa destructor or a population of Varroa destructor associated with the beehive and/or the bees.

[0063] In another aspect, embodiments of the present disclosure include a process of preparing a composition for use in treating Varroa destructor infestation in a beehive having Varroa destructor infestation.

[0064] In some embodiments, the process includes the step(s) of obtaining (one or more strains of) bacteria from Varroa destructor (e.g., from inside Varroa destructor), the (one or more strains of) bacteria preferably selected from the group consisting of at least one strain of Bacillus sp. (e.g., Bacillus paralicheniformis), at least one strain of Hafnia sp. (e.g., Hafnia paralvei), and at least one strain of Escherichia sp. (e.g., Escherichia coli).

[0065] In some embodiments, the step of obtaining the one or more strains of bacteria can comprise isolating the Varroa destructor mites from the beehive (to obtain the bacteria therefrom).

[0066] In some embodiments, the step of obtaining the one or more strains of bacteria can comprise (optionally) sterilizing (the surface or exterior of) the Varroa destructor mites. In some embodiments, sterilizing (the surface or exterior of) the Varroa destructor mites can include or be by exposure to UV light. In some embodiments, sterilizing (the surface or exterior of) the Varroa destructor mites can avoid, be devoid of, or not include exposure to one or more (or any) chemical sterilizing agent(s), such as ethanol, methanol, ammonia, bleach, etc. Illustratively, and without being bound to any particular theory, use of such sterilizing agents may be problematic, as an amount of sterilizing agent ingested by the Varroa mite(s) may be sufficient to kill internal bacteria, which would negate the step of isolating internal bacteria.

[0067] In some embodiments, the step of obtaining the one or more strains of bacteria can comprise (optionally) disrupting or homogenizing the (optionally sterilized) Varroa destructor mites. In some embodiments, the disrupting or homogenizing can include or be by sterile mortar and pestle, bead-beating, or any other suitable mite disruption or homogenizing method known in the art. In some embodiments, the disrupting or homogenizing can avoid, be devoid of, or not include one or more chemical lysis or disrupting agent(s).

[0068] In some embodiments, the process includes the step(s) of contacting the bacteria with a biological sample containing bacteriophage. In some embodiments, the biological sample preferably contains naturally-occurring bacteriophage.

[0069] In one or more embodiments, the biological sample can comprise soil, plant material, sewage, or sewage water. In at least one preferred embodiment, the biological sample comprises sewage or sewage water. In at least one preferred embodiment, the sewage or sewage water can comprise human biological waste. In at least one preferred embodiment, the biological sample containing bacteriophage is not taken from the beehive or the bees. In an alternative embodiment, the biological sample containing bacteriophage is taken from the beehive or the bees.

[0070] In at least one respect, obtaining (naturally-occurring) bacteriophage from (human) sewage, sewer water, waste, etc. for the purpose of isolating bacteriophage against (or having specificity or cellular tropism for) beneficial bacteria internal to the Varroa mite is an unexpected, unpredictable approach, yielding surprising and/or unexpected beneficial results.

[0071] In some embodiments, the process includes the step(s) of incubating the bacteria with the bacteriophage in an enrichment culture.

[0072] In some embodiments, the process includes the step(s) of isolating enriched bacteriophage from the enrichment culture.

[0073] In some embodiments, the process includes the step(s) of purifying the isolated enriched bacteriophage to obtain one or more enriched bacteriophage strains.

[0074] In some embodiments, the enriched bacteriophage are preferably more numerous in the enrichment culture than they are in the biological sample.

[0075] In some embodiments, the process includes the step(s) of characterizing the one or more enriched bacteriophage strains.

[0076] In some embodiments, the step(s) of characterizing the one or more enriched bacteriophage strains can include sequencing respective genomes of each of the one or more enriched bacteriophage strains.

[0077] In some embodiments, the step(s) of characterizing the one or more enriched bacteriophage strains can include selecting bacteriophage strain(s) having a genome devoid of toxin genes, virulence factor genes, and/or integrase genes.

[0078] In some embodiments, the step(s) of characterizing the one or more enriched bacteriophage strains can include optionally determining a level of genomic redundancy between the one or more enriched bacteriophage strains.

[0079] In some embodiments, the step(s) of characterizing the one or more enriched bacteriophage strains can include measuring lytic activity of the one or more enriched bacteriophage strains.

[0080] In some embodiments, the step(s) of characterizing the one or more enriched bacteriophage strains can include selecting bacteriophage strain(s) that are lytic and/or not lysogenic.

[0081] In some embodiments, the step(s) of characterizing the one or more enriched bacteriophage strains can include determining specificity or cellular tropism of the one or more enriched bacteriophage strain(s). In at least one aspect the tropism comprises a narrow host range that includes the one or more strains of Bacillus sp. (e.g., Bacillus parahcheniformis), Hafnia sp. (e.g., Hafnia paralvei), or Escherichia sp. (e.g., Escherichia coli). present in the Varroa mite.

[0082] In some embodiments, the step(s) of characterizing the one or more enriched bacteriophage strains can include selecting bacteriophage strain(s) with specificity or cellular tropism for at least one of the one or more strains of bacteria from (or internal to) Varroa destructor mites, the at least one strain preferably selected from the group consisting of a strain of Bacillus sp. (e.g., Bacillus paralicheniformis), a strain of Hafnia sp., (e.g., Hafnia paralvei), and a strain of Escherichia sp., (e.g., Escherichia coli).

[0083] In some embodiments, the step(s) of characterizing the one or more enriched bacteriophage strains can include optionally performing electron microscopy on the one or more bacteriophage to determine phage morphology and/or structural classification of the one or more bacteriophage.

[0084] In some embodiments, the step(s) of characterizing the one or more enriched bacteriophage strains can include selecting bacteriophage strain(s) with suitable morphology and/or structural classification, as understood by those skilled in the art.

[0085] In some embodiments, the process includes the step(s) of combining one or more of the selected bacteriophage strain(s) with a carrier or excipient.

[0086] In some embodiments, the process can include excluding from the composition any bacteriophage having a genome that comprises a toxin or virulence factor gene or an integrase gene. In some embodiments, the process can include excluding from the composition, based on the sequenced genome, one or more bacteriophage with a threshold degree of genomic/genetic relatedness to another bacteriophage (having a related tropism).

[0087] This summary is provided to introduce a selection of concepts in a simplified form that are further described below in the detailed description. This summary is not intended to identify key features or essential features of the claimed subject matter, nor is it intended to be used as an indication of the scope of the claimed subject matter.

[0088] Some embodiments of the present disclosure can include any of the features, options, and/or possibilities set out elsewhere in the present disclosure, including in other aspects or embodiments of the present disclosure. It is also noted that each of the foregoing, following, and/or other features described herein represent a distinct embodiment of the present disclosure. Moreover, combinations of any two or more of such features represent distinct embodiments of the present disclosure. Such features or embodiments can also be combined in any suitable combination and/or order without departing from the scope of this disclosure. Thus, each of the features described herein can be combinable with any one or more other features described herein in any suitable combination and/or order. Accordingly, the present disclosure is not limited to the specific combinations of exemplary embodiments described in detail herein.

[0089] Additional features and advantages of illustrative embodiments of the present disclosure will be set forth in the description which follows, and in part will be obvious from the description, or may be learned by the practice of such illustrative embodiments. The features and advantages of such embodiments may be realized and obtained by means of the instruments and combinations particularly pointed out in the appended claims. These and other features will become more fully apparent from the following description and appended claims, or may be learned by the practice of such illustrative embodiments as set forth hereinafter.

### BRIEF DESCRIPTION OF THE DRAWINGS

[0090] In order to describe the manner in which the above recited and other advantages and features of the disclosure can be obtained, a more particular description of the disclosure briefly described above will be rendered by reference to specific embodiments thereof, which are illustrated in the appended drawings. It is appreciated that these drawings depict only typical embodiments of the disclosure and are not therefore to be considered to be limiting of its scope. The disclosure will be described and explained with additional specificity and detail through the use of the accompanying drawings in which:

[0091] FIG. 1 illustrates whole genome nucleotide comparison of bacteriophages that infect Varroa destructor mite bacteria.

### DETAILED DESCRIPTION

[0092] Before describing various embodiments of the present disclosure in detail, it is to be understood that this disclosure is not limited to the specific parameters, verbiage, and description of the particularly exemplified systems, methods, and/or products that may vary from one embodiment to the next. It is also to be understood that much, if not all of the terminology used herein is for the purpose of describing particular embodiments of the present disclosure, and is not necessarily intended to limit the scope of the disclosure in any particular manner. Thus, while certain embodiments of the present disclosure will be described in detail, with reference to specific configurations, parameters, features (e.g., ingredients, components, members, elements, parts, and/or portions), etc., the descriptions are illustrative and are not to be construed as limiting the scope of the present disclosure and/or the claimed invention. In addition, the terminology used herein is for the purpose of describing the embodiments, and is not necessarily intended to limit the scope of the present disclosure and/or the claimed invention.

### Abbreviated List of Defined Terms

[0093] To assist in understanding the scope and content of the foregoing and forthcoming written description and appended claims, a select few terms are defined directly below. Unless defined otherwise, all technical and scientific terms used herein have the same meaning as commonly understood by one of ordinary skill in the art to which the present disclosure pertains.

[0094] As used herein, the term “Varroacidal” refers to pesticidal (death-inducing or resulting in death) treatment or activity against Varroa destructor associated with a beehive and/or bees associated with the beehive. The term “Varroastatic” refers to pestistatic (growth or maturation abrogating and/or reproduction-inhibiting) treatment or activity against Varroa destructor associated with a beehive and/or bees associated with the beehive.

[0095] The terms “bacteriophage” or “phage,” as used herein, includes any prokaryotic virus, preferably lytic viruses, that infect and lyse or kill bacteria. “Bacteriophage” and “phage” are used interchangeably and can include naturally-occurring and recombinant bacteriophages, unless otherwise indicated. Reference to a phage or bacteriophage should not be construed as referring to a single, individual virus or viral entity, unless context clearly dictates otherwise. Rather, reference to a phage or bacteriophage generally includes or refers to a population, amount, or concentration of bacteriophage entities, and more particularly to a population, amount, or concentration of a bacteriophage strain or line. A “naturally-occurring” bacteriophage is a phage isolated from a natural or human-made environment that has not been modified by genetic engineering. A “recombinant bacteriophage” is a phage that comprises a genome that has been genetically modified by insertion of a heterologous nucleic acid sequence into the genome or by removal of a nucleic acid sequence from the genome. The genome of a naturally-occurring phage may be modified by recombinant DNA technology to introduce a heterologous nucleic acid sequence into the genome at a defined site. Additionally, or alternatively, the genome of a naturally-occurring phage may be modified by recombinant DNA technology to remove nucleic acid sequences that, for example, encode bacterial virulence factors (e.g., toxins). A further description of bacteriophages can be found in U.S. Pat. No. 9,617,522, the entirety of which is incorporated by reference herein.

[0096] As used herein, the term “cocktail,” “bacteriophage cocktail, “phage cocktail,” or similar is intended to be understood as a composition that includes two or more bacteriophages, and particularly, two or more strains of bacteriophage (each illustratively having a respective (cellular) tropism or specificity/infectivity that may differ in one or more respects from other bacteriophage(s) or strain(s)). The composition may have a proportional or disproportional number or concentration of phages, and the phages comprising the cocktail may have overlapping or non-overlapping tropisms. The cocktail can be in a dry form or suspended in a pharmaceutically-acceptable carrier.

[0097] The term “microbiome” may refer generally to the collective genomes of the microbiota or to the microorganisms themselves and may be used synonymously with the term microbiota. The term “microbiota” generally refers to the population, collection, and/or totality of microbes in a defined environment, habitat, or ecological community, and typically includes a plurality of genera, species, or strains of commensal, symbiotic, beneficial, and/or opportunistic pathogenic microorganisms (e.g., bacteria, archaea, fungae, protists, and/or viruses), and typically including their genetic elements (genomes). For example, as used herein, the term “microbiota” or “microbiome” is generally made with reference to the population of microbes inhabiting the Varroa destructor mite (e.g., internal to the Varroa destructor mite) and/or the (gut of the) honeybee.

[0098] The term “tropism” or “cellular tropism” is understood as the host range, number, and/or type of bacteria, that a given bacteriophage may successfully infect.

[0099] The term “narrow host range,” as used herein, particularly with respect to the tropism of a given bacteriophage, refers to the quality, characteristic, or capability of a bacteriophage to infect and kill only a specific subset of bacterial genera and/or species.

[0100] The term “probiotic” (a.k.a, “good bacteria,” “friendly bacteria, “beneficial bacteria,” etc.) refers to non-pathogenic bacterium/bacteria that provide(s) one or more health benefit(s) to the host organism in which the bacterium/bacteria lives or grows. Without being bound to any particular theory, probiotics can be internal to the organism and/or known to benefit host organisms by enhancing or augmenting food digestion and/or nutrient absorption, producing vitamins (e.g., folic acid, niacin, and vitamins B6 and B12), and/or protect against pathogenic bacteria by territorially crowding out such “bad bacteria,” producing acids or toxins that inhibit pathogenic bacterial growth, and/or stimulating the host immune system to fight off the pathogenic bacteria.

[0101] The terms “sequence identity” or “identity” refers to a specified percentage of residues in two nucleic acid or amino acid sequences that are identical when aligned for maximum correspondence over a specified comparison window, as measured by sequence comparison algorithms or by visual inspection. When sequences differ in conservative substitutions, the percent sequence identity may be adjusted upwards to correct for the conservative nature of the substitution. Sequences that differ by such conservative substitutions are said to have “sequence similarity” or “similarity.” Means for making this adjustment are well known to those of skill in the art. Typically this involves scoring a conservative substitution as a partial rather than a full mismatch, thereby increasing the percentage sequence identity.

[0102] Various aspects of the present disclosure, including systems, methods, and/or products may be illustrated with reference to one or more embodiments, which are exemplary or illustrative in nature. As used herein, the term “embodiment” means “serving as an example, instance, or illustration,” and should not necessarily be construed as preferred or advantageous over other aspects disclosed herein. In addition, reference to an embodiment is intended to provide an illustrative example without limiting the scope of the invention, which is indicated by the appended claims rather than by the description thereof. The terms “exemplary,” “illustrative,” and so forth can be used interchangeably and/or to make reference to one or more embodiments.

[0103] The term “comprising” is synonymous with “including,” “having,” “containing,” or “characterized by.” These terms are inclusive and open-ended and do not exclude additional, unrecited elements or method steps. Similarly, the terms “including,” “having,” “involving,” “containing,” “characterized by,” variants thereof (e.g., “includes,” “has,” and “involves,” “contains,” etc.), and similar terms as used herein, including the claims, shall be inclusive and/or open-ended, shall have the same meaning as the word “comprising” and variants thereof (e.g., “comprise” and “comprises”), and do not exclude additional, un-recited elements or method steps, illustratively. The phrase “consisting of” excludes any element, step, or ingredient not specified in the claim. When this phrase appears in a clause of the body of a claim, rather than immediately following the preamble, it limits only the element set forth in that clause; other elements are not excluded from the claim as a whole. The phrase “consisting essentially of” limits the scope of a claim to the specified materials or steps, plus those that do not materially affect the basic and novel characteristic(s) of the claimed subject matter. The terms “comprising”, “consisting of”, and “consisting essentially of” can be alternatively used. When one of these three terms is used, the presently disclosed and claimed subject matter can include the use of either of the other two terms.

[0104] The words “can” and “may” are used in a permissive sense (i.e., meaning having the potential to), rather than the mandatory sense (i.e., meaning must).

[0105] As used in this specification and the appended claims, the singular forms “a,” “an” and “the” each contemplate, include, and specifically disclose both the singular and plural referents, unless the context clearly dictates otherwise. For example, reference to a “fertilizer” contemplates and specifically discloses one, as well as two or more fertilizers. Similarly, use of a plural referent does not necessarily require a plurality of such referents, but contemplates, includes, and specifically discloses one, as well as two or more of such referents, unless the context clearly dictates otherwise.

[0106] The terms “plurality” and “at least two” are used interchangeably.

[0107] As used herein, the term “about” or “approximately,” with regard to a value, generally means or implies +/−10% of the stated value or amount represented thereby. Moreover, throughout the present disclosure, the term “about” is used in connection with a percent concentration or composition of a component or ingredient. In such instance, the term “about” or “approximately” and/or the term “+/−10%” implies and/or includes +/−10% of the stated numeric value, as opposed to +/−10 percentage points of the recited percent. By way of example, where 20% w/w of a component or ingredient reflects 20 g of the component or ingredient per 100 mL of total mixture, the term “about” and/or the term “+/−10%” implies and/or includes a recited range from 18 g to 22 g (i.e., from 18% w/w to 22% w/w), not a range of 10% w/w to 30% w/w. Alternatives for so-called “about” values and/or +/−10% include +/−1%, +/−2%, +/−3%, +/−4%, +/−5%, +/−6%, +/−7%, +/−8%, or +/−9% of the stated value, each of which is contemplated as a suitable alternative to or substitute for the term “about” or the use of +/−10% herein.

[0108] Unless otherwise indicated, numbers expressing quantities, constituents, or other measurements used in the specification and claims are to be understood as being modified by the term “about,” as that term is defined herein. Accordingly, unless indicated to the contrary, the numerical parameters set forth in the specification and attached claims are approximations that may vary depending upon the desired properties sought to be obtained by the subject matter presented herein. At the very least, and not as an attempt to limit the application of the doctrine of equivalents to the scope of the claims, each numerical parameter should at least be construed in light of the number of reported significant digits and by applying ordinary rounding techniques. Notwithstanding that the numerical ranges and parameters setting forth the broad scope of the subject matter presented herein are approximations, the numerical values set forth in the specific examples are reported as precisely as possible. Any numerical values, however, inherently contain certain errors necessarily resulting from the standard deviation found in their respective testing measurements.

[0109] For the sake of brevity, the present disclosure may recite a list or range of numerical values. It will also be appreciated that where two or more values, or a range of values (e.g., less than, greater than, at least, and/or up to a certain value, and/or between two recited values) is disclosed or recited, any specific value or range of values falling within the disclosed values or range of values is likewise specifically disclosed and contemplated herein. Thus, disclosure of an illustrative measurement (e.g., length, width, thickness, etc.) that is less than or equal to about 10 units or between 0 and 10 units includes, illustratively, a specific disclosure of: (i) a measurement of 9 units, 5 units, 1 units, or any other value between 0 and 10 units, including 0 units and/or 10 units; and/or (ii) a measurement between 9 units and 1 units, between 8 units and 2 units, between 6 units and 4 units, and/or any other range of values between 0 and 10 units.

[0110] As used herein, the term “substantially” represents or implies an (or any) amount close to the stated amount (e.g., that still performs a desired function or achieves a (desired, intended, or expected) result). For example, the term “substantially” may refer to an amount that is within, or less than, 10%, 5%, 1%, 0.1%, 0.01%, or other percent of a stated amount. As used herein, the term “substantially devoid” means (1) an undetectable or unquantifiable amount, (2) less than or below an amount generally considered by those skilled in the art to reflect a detectable or quantifiable amount, and/or (3) less than or below an amount generally considered by those skilled in the art to be functional or able to achieve a (desired, intended, or expected) result (e.g., less than 10%, 5%, 1%, 0.1%, 0.01%, or other percent).

[0111] Percent concentrations or compositions, as presented herein, represent values measured as a w/w percent, w/v percent, or v/v percent.

[0112] As used herein, “products” include compositions, formulations, mixtures, kits, systems, and so forth. Similarly, “methods” include processes, procedures, steps, and so forth.

[0113] In addition, various aspects or embodiments of the present disclosure can be illustrated by describing components that are mixed together. As used herein, “mixed,” “mixing,” and similar terms indicate a physical combining or combination of two or more components. In some embodiments, the physical combining or combination results in a (chemical and/or physical) reaction. Such chemical reactions can be evidenced by a change in the chemical composition, pH, or other indicator relative to the components prior to being mixed (or as expected after being mixed absent the reaction). Thus, mixing and/or mixed components can include reacting and/or reacted components in certain embodiments. Accordingly, reference to mixing or mixed components includes a reference to reacting or reacted components.

[0114] Specific language will be used herein to describe the illustrative embodiments. Nevertheless it will be understood that no limitation of the scope of the disclosure is thereby intended. Rather, it is to be understood that the language used to describe the exemplary embodiments is illustrative only and is not to be construed as limiting the scope of the disclosure (unless such language is expressly described herein as essential).

[0115] While the detailed description is separated into sections, the section headers and contents within each section are for organizational purposes only and are not intended to be self-contained descriptions and embodiments or to limit the scope of the description or the claims. Rather, the contents of each section within the detailed description are intended to be read and understood as a collective whole, where elements of one section may pertain to and/or inform other sections. Accordingly, embodiments specifically disclosed within one section may also relate to and/or serve as additional and/or alternative embodiments in another section having the same and/or similar products, methods, and/or terminology.

[0116] It should also be appreciated that any headings and subheadings used herein are for organizational purposes only and are not meant to be used to limit the scope of the description or the claims.

### Overview of Disclosed Embodiments

[0117] The (internal) microbiome of the Varroa destructor mite consists of the microscopic eukaryota, archaea, bacteria and viruses living in the Varroa destructor mite. Many of these microbes are likely required for mite health as has been demonstrated in many animals, with specific strains co-evolving optimized symbiotic properties such as nutritional aids in digestion or absorption, vitamin biosynthesis, immune modulators and even modulators of mite behavior. These specific-coevolved strains can be targeted by naturally occurring bacteriophages, or viruses that kill bacteria. Bacteriophages are often highly specific for the bacteria they infect, commonly distinguishing different strains of a single species of bacteria. The invention herein presents a method for utilizing bacteriophage specificity to target key microbes in, internal to, and/or associated with the Varroa mite, rendering them sick and/or unable to thrive and/or replicate through the disruption of key natural microbiota.

[0118] Compositions of the present disclosure can provide a targeted therapy for Varroa destructor infestation in beehives by specifically lysing and/or killing one or more strains of Bacillus sp. (e.g., Bacillus paralicheniformis), Hafnia sp. (e.g., Hafnia paralvei), and/or Escherichia sp. (e.g., Escherichia coli) found in the Varroa mite (internal) microbiome and that confer a benefit or advantage on the Varroa mite. For example, compositions disclosed herein include one or more bacteriophages that specifically target and kill Bacillus sp. (e.g., Bacillus paralicheniformis), Hafnia sp. (e.g., Hafnia paralvei), and/or Escherichia sp. (e.g., Escherichia coli) while not infecting abundant probiotics (or “good” bacteria) in the beehive (ecosystem) and, specifically, in the bee (e.g., bee gut). Unlike broad-spectrum antibiotics, which indiscriminately kill, each of the one or more bacteriophages within the disclosed compositions has a narrow tropism, killing only a specific subset of bacterial genera and/or species. This beneficially allows the reduction and/or eradication of a targeted subset of bacteria—the one or more strains of Bacillus sp. (e.g., Bacillus paralicheniformis), Hafnia sp. (e.g., Hafnia paralvei), and/or Escherichia sp. (e.g., Escherichia coli) found in the Varroa mite (internal) microbiome and that confer a benefit or advantage on the Varroa mite—while leaving unharmed other bacteria within the beehive.

[0119] Thus, the bacteriophages (or phage cocktails comprising the same) can be configured for, adapted for, or otherwise capable of targeting, infecting, and killing (e.g. lysing) a single (species or strain of) bacterium, or a plurality of closely-related (species or strains of) bacteria. Redundancy or overlap in tropism may be desirable in some aspects of the present disclosure. Variety and diversity in tropism may be desirable in some aspects of the present disclosure. For example, some Varroa mites may have an imparlance in a single species or strain of bacterium in their (internal) microbiome, while other may have an imparlance in a plurality of species or strains of bacteria in their (internal) microbiome. Different combinations or two or more bacteriophage can be selected to target the single or plurality of bacteria that may be known or determined to be an effective target for affecting Varroa mite health, reproduction, growth, maturation, etc. Moreover, in certain instances, bacteria may be adapted to or capable of mutating to escape targeting, infection, or destruction by one or more strains of bacteriophage. Accordingly, compositions according to some aspects of the present disclosure may include at least two bacteriophage have tropism for the same (species or strain of) bacterium or at least some of the same bacteria, but preferably through different (genetic or tropic) mechanisms of action.

### Illustrative Compositions, Formulations and Dosage

[0120] Illustrative compositions according to various embodiments of the present disclosure are recited in the SUMMARY section, above.

[0121] As provided above, compositions of the present disclosure includes an acceptable carrier or excipient in addition to one or more bacteriophages. As used herein, the carrier or excipient can be a biologically compatible formulation, gaseous, liquid or solid, or mixture thereof, that is suitable for one or more routes of administration, in vivo delivery, or contact. A formulation is compatible in that it does not destroy activity of an active ingredient therein (e.g., the bacteriophage or bacteriophage cocktail) or induce adverse side effects that outweigh any prophylactic or therapeutic effect or benefit.

[0122] It should be appreciated that the disclosed compositions may contain one or more carriers or excipients. Acceptable carriers and excipients (or the acceptability thereof) can be determined in part by the particular composition being administered, as well as by the particular method used to administer the composition.

[0123] Moreover, the compositions described herein may be formulated in any form suitable for the intended method of application or administration. Specifically, the carrier or excipient may be suitable for or compatible with the method of application or administration. Illustratively, in one or more embodiments, the carrier or excipient can be or comprise (i) one or more liquid components (e.g., suitable for liquid applications, spraying, misting, etc. or in a feeding liquid or drinking water), (ii) one or more aerosol components (e.g., suitable for aerosol applications, ultralow volume fogger application, surface acoustic wave nebulization, etc.), and/or (iii) one or more solid (or semi-solid) components (e.g., suitable for solid applications, dusting, powder disbursement, etc. or in a feed component). For example, in some embodiments, liquid colloids, aqueous or oil suspensions, non-aqueous solutions, dispersible powders or granules (including micronized particles or nanoparticles), emulsions, or syrups may be prepared.

[0124] In at least one embodiment, the carrier or excipient cam be or comprise lactose and/or leucine.

[0125] In at least one embodiment, the composition may be formulated as solution or suspension comprising one or more bacteriophage in admixture with at least one excipient suitable for the manufacture of a solution or suspension of the one or more bacteriophage. Such a solution or suspension can be applied or administered by any suitable means know in the art.

[0126] In yet another embodiment, compositions may be formulated as dispersible powders and granules suitable for preparation of a suspension by the addition of suitable excipients. Such dispersible powders and granules can be applied or administered by any suitable means know in the art.

[0127] Illustratively, the carrier or excipient can comprise a buffer or buffering agent (in water). Illustratively, the carrier or excipient can comprise a buffered solution (e.g., buffering agent(s) in water). Buffering agents can be suitable for buffering the composition (in liquid/water) at any suitable pH (e.g., greater than, less than, equal to, between, and/or about pH 6.5, 6.6, 6.7, 6.8, 6.9, 7.0, 7.1, 72, 7.3, 7.4, 7.5, 7.6, 0.7.7, 7.8, 7.9, 8.0, 8.1, 8.2, 8.3, 8.4, or 8.5).

[0128] Illustratively, the buffering agent can be or comprise a sodium phosphate buffer (in water). In some embodiments, the buffer can be or comprise (greater than or equal to) about 25 mM, 50 mM, 100 mM 150 mM, or 200 mM sodium phosphate buffer (pH 7.0-7.9). In some embodiments, the buffer or buffering agent can be or comprise (greater than or equal to) about 50 mM sodium phosphate buffer (pH ˜7.4).

[0129] In at least one embodiment, the carrier or excipient can be or compose SM buffer (in water), as known in the art.

[0130] Illustratively, the carrier or excipient can comprise one or more salts. In some embodiments, the salt(s) can be or comprise NaCl (or CaCl, MgCl, KCl), or corresponding or other anion/cation salt combination, as known in the art and suitable for bee/beehive applications. In some embodiments, the salt(s) (e.g., NaCl) can be included in the composition (or carrier or excipient thereof) at a concentration of greater than, less than, equal to, between, and/or about 1 g/L, 2 g/L, 3 g/L, 4 g/L, 4.5 g/L, 5 g/L, 5.1 g/L, 5.2 g/L, 5.3 g/L, 5.4 g/L, 5.5 g/L, 5.6 g/L, 5.7 g/L, g/L, 5.9 g/L, 6.0 g/L, 6.5 g/L, 7 g/L, etc. or greater than, less than, equal to, between, and/or about 50 mM, 60 mM, 70 mM, 75 mM, 80 mM, 85 mM, 90 mM, 95 mM, 100 mM, 105 mM, 110 mM, 115 mM, 120 mM, 125 mM, 130 mM, 140 mM, 150 mM, etc. In some embodiments, the salt can be or comprise (greater than or equal to) about 5.8 g/L NaCl (or (greater than or equal to) about 100 mM).

[0131] Alternatively, or in addition, the salt can be or comprise MgSO4 (e.g., MgSO4·7H2O) or a corresponding or other anion/cation salt combination, as known in the art and suitable for bee/beehive applications. In some embodiments, the salt(s) (e.g., NaCl) can be included in the composition (or carrier or excipient thereof) at a concentration of greater than, less than, equal to, between, and/or about 0.1 g/L, 0.25 g/L, 0.5 g/L, 1 g/L, 1.1 g/L, 1.2 g/L, 1.3 g/L, 1.4 g/L, 1.5 g/L, 1.6 g/L, 1.7 g/L, 1.8 g/L, 1.9 g/L, 2.0 g/L, 2.1 g/L, 2.2 g/L, 2.3 g/L, 2.4 g/L, 2.5 g/L, 2.6 g/L, 2.7 g/L, 2.8 g/L, 2.9 g/L, 3.0 g/L, 3.5 g/L, 4 g/L, etc., or greater than, less than, equal to, between, and/or about 0.5 mM, 1 mM, 2 mM, 3 mM, 4 mM, 5 mM, 6 mM, 7 mM, 7.5 mM, 8 mM, 8.5 mM, 9 mM, 11 mM, 12 mM, 13 mM, 14 mM, 15 mM, etc. In some embodiments, the salt can be or comprise (greater than or equal to) about 2 g/L MgSO4·7H2O (or (greater than or equal to) about 8 mM).

[0132] Illustratively, the carrier or excipient can comprise one or more peptides.

[0133] Illustratively, the carrier or excipient can comprise a yeast extract.

[0134] Illustratively, the carrier or excipient can be or comprise greater than or equal to about 50 mM sodium phosphate buffer (pH 7.4), 5.8 g/L NaCL (100 mM final), 2 g/L MgSO4·7H2O (8 mM final).

[0135] Additional or alternative excipients suitable for use in connection with suspensions include suspending agents, such as sodium carboxymethylcellulose, methylcellulose, hydroxypropyl methylcellulose, sodium alginate, polyvinylpyrrolidone, gum tragacanth, gum acacia, dispersing, or wetting agents such as a naturally occurring phosphatide (e.g., lecithin), a condensation product of an alkylene oxide with a fatty acid (e.g., polyoxyethylene stearate), a condensation product of ethylene oxide with a long chain aliphatic alcohol (e.g., heptadecaethyleneoxycethanol), a condensation product of ethylene oxide with a partial ester derived from a fatty acid and a hexitol anhydride (e.g., polyoxyethylene sorbitan monooleate); polysaccharides and polysaccharide-like compounds (e.g., dextran sulfate); glycoaminoglycans and glycosaminoglycan-like compounds (e.g., hyaluronic acid); and thickening agents, such as carbomer, beeswax, hard paraffin, or cetyl alcohol. The suspensions may also contain one or more preservatives such as acetic acid, methyl and/or n-propyl p-hydroxy-benzoate; one or more coloring agents; one or more flavoring agents; and one or more sweetening agents such as sucrose or saccharin.

[0136] The compositions may also be in the form of oil-in water emulsions. The oily phase may be a vegetable oil, such as olive oil or arachis oil, a mineral oil, such as liquid paraffin, or a mixture of these. Suitable emulsifying agents include naturally-occurring gums, such as gum acacia and gum tragacanth; naturally occurring phosphatides, such as soybean lecithin, esters, or partial esters derived from fatty acids; hexitol anhydrides, such as sorbitan monooleate; and condensation products of these partial esters with ethylene oxide, such as polyoxyethylene sorbitan monooleate. The emulsion may also contain sweetening and flavoring agents. Syrups and elixirs may be formulated with sweetening agents, such as glycerol, sorbitol, or sucrose. Such formulations may also contain a demulcent, a preservative, a flavoring, or a coloring agent.

[0137] Cosolvents and adjuvants may be added to the formulation. Non-limiting examples of cosolvents contain hydroxyl groups or other polar groups, for example, alcohols, such as isopropyl alcohol; glycols, such as propylene glycol, polyethyleneglycol, polypropylene glycol, glycol ether; glycerol; polyoxyethylene alcohols and polyoxyethylene fatty acid esters. Adjuvants include, for example, surfactants such as, soya lecithin and oleic acid; sorbitan esters such as sorbitan trioleate; and polyvinylpyrrolidone.

[0138] Accordingly, there exists a wide variety of suitable formulations of pharmaceutical compositions (see, e.g., Remington's Pharmaceutical Sciences, incorporated herein by reference). Suitable excipients may be or include carrier molecules and can include antioxidants such as ascorbic acid; chelating agents such as EDTA; carbohydrates such as dextrin, hydroxyalkylcellulose, hydroxyalkylmethylcellulose, and stearic acid; liquids such as oils, water, saline, glycerol and ethanol; wetting or emulsifying agents; pH buffering substances; and the like. Liposomes are also included within the definition of pharmaceutically acceptable excipients. Additional or alternative examples of carriers include silicon dioxide (silica, silica gel), carbohydrates or carbohydrate polymers (polysaccharides), cyclodextrins, starches, degraded starches (starch hydrolysates), chemically or physically modified starches, modified celluloses, gum arabic, ghatti gum, tragacanth, karaya, carrageenan, guar gum, locust bean gum, alginates, pectin, inulin or xanthan gum, or hydrolysates of maltodextrins. In various embodiments, the bacteriophage can be dispersed throughout the carrier.

[0139] The compositions of the present disclosure further comprise (an amount of) one or more bacteriophage described/disclosed herein. It should be appreciated that the compositions and/or formulations disclosed herein contain a total amount of one or more bacteriophages (collectively or individually) sufficient to achieve the intended result/effect.

[0140] The compositions may, for convenience, be prepared or provided as a unit dosage form and can be packaged in unit dosage forms for ease of administration and uniformity of dosage. A “unit dosage form” as used herein refers to a physically discrete unit suited as unitary dosages for the subject to be treated. Each unit containing a predetermined quantity of the one or more bacteriophage optionally in association with a pharmaceutically-acceptable carrier (e.g., excipient, diluent, vehicle or filling agent) which, when administered in one or more doses, is calculated to produce the desired effect. Unit dosage forms can contain a daily or weekly dose or unit, daily or weekly sub-dose, or an appropriate fraction thereof, of an administered compound. A sterile liquid carrier, for example, can be added prior to administration or delivery in vivo. Unit dosage forms additionally include, for example, ampules and vials with liquid compositions disposed therein. The individual unit dosage forms can be included in multi-dose kits or containers.

[0141] A dosage (or administration) of the composition can one or more doses. A dose of the composition can include, for example, greater than or equal to 1×10⁴ PFU/mL or PFU/mg of composition of one or more bacteriophage, in accordance with one or more aspects or embodiments of the present disclosure. Alternative doses can include greater than or equal to 1×10⁵, 1×10⁶, 1×10⁷, 1×10⁸, 1×10⁹, 1×10¹⁰, 1×10¹¹, 1×10¹² or more PFU/mL or PFU/mg. Suitable dosage size or amounts can range from 1 μL to 1000 mL or more (e.g., of fluid or semi-solid composition), 1 μg to 5000 mg or more (e.g., of solid or semi-solid composition), or other amount as known in the art.

[0142] The disclosed compositions can be administered in accordance with the methods at any frequency as a single bolus or multiple dose e.g., one, two, three, four, five, or more times daily, weekly, or monthly, and/or for as long as appropriate. Exemplary frequencies are typically from 1-3 times, 2-times or once, daily or weekly; for example, once per week or twice per week for 1, 2, 3, 4, 5, 6, 7, 8, 9, 10, 11, or 12 months of the year. Timing of administration can be dictated by the desired effect. The skilled artisan will appreciate the factors that may influence the dosage, frequency, and timing required to provide an amount sufficient or effective for providing the desired effect or benefit. Dosage and administration can be adjusted to provide sufficient levels of the one or more bacteriophage (collectively or individually) or to maintain the desired effect.

[0143] In at least one embodiment, the composition can be administered or received as part of a treatment protocol. The treatment protocol can include a first treatment period (or phase). The first treatment phase can include a first dosage of the composition, administered or received in accordance with a first dosage schedule. The first dosage schedule can be, for example, a daily dosage schedule or any other suitable dosage schedule (e.g., twice daily, every other day, once weekly, twice weekly, etc.). The first dosage can include any suitable dose (amount) disclosed herein. In at least one embodiment, the first dose (amount) of the first dosage in the first treatment phase can be or include a (relatively high) initial treatment dose (e.g., greater than or equal to 1×10⁶, 1×10⁷, 1×10⁸, 1×10⁹, or 1×10¹⁰ PFU/mL or PFU/mg, or more). In some embodiments, the first dosage phase (or schedule thereof) can be or last for any suitable amount of time (e.g., greater than or equal to 1 week, 2 weeks, 3 weeks, 4 weeks, 1 month, 2 months, 3 months, 6 months, 9 months, 1 year, etc.).

[0144] In some embodiments, the treatment protocol can include a second treatment period (or phase). The second treatment phase can include a second dosage of the composition, administered or received in accordance with a second dosage schedule. The second dosage schedule can be, for example, a weekly dosage schedule or any other suitable dosage schedule (e.g., daily, every other day, twice weekly, etc.). The second dosage can include any suitable dose (amount) disclosed herein. In at least one embodiment, the second treatment phase can include a (lower) maintenance treatment dose (e.g., greater than or equal to 1×10⁴, 1×10⁵, 1×10⁶, 1×10⁷, or 1×10⁸ PFU/mL or PFU/mg. Illustratively, the second dosage can include a lower concentration of phage that the first dosage. Alternatively, or in addition, the second treatment phase can include a less frequent dosage schedule than the first treatment phase. In some embodiments, the second dosage phase (or schedule thereof) can be or last for any suitable amount of time (e.g., greater than or equal to 3 months, 6 months, 9 months, 1 year, 2 years, 3 years, etc., or indefinitely).

[0145] In some embodiments, a composition containing one or more bacteriophages is co-administered with a probiotic and/or prebiotic. Embodiments of the present disclosure can include kits that include one or more of the inventive compositions, optionally with one or more probiotic and/or prebiotic compositions, as will be apparent to those skilled in the art.

[0146] As used herein, “co-administration” means concurrently or administering one substance followed by beginning the administration of a second substance within 24 hours, 20 hours, 16 hours, 12 hours, 8 hours, 4 hours, 1 hour, 30 minutes, 15 minutes, 5 minutes, 1 minute, a range bounded by any two of the aforementioned numbers, and/or about any of the aforementioned numbers. In some embodiments, co-administration is concurrent administration.

[0147] In some embodiments, the bacteriophage-based product may be delivered to the beehive once or twice a week by several delivery methods including ultralow volume fogging or surface acoustic wave nebulization of a liquid or other suitable sample form, or delivery of a lyophilized power, or a solid liquid substance into the beehive, which delivers the bacteriophages through a combination of bee movement and/or evaporation throughout the hive. The bacteriophage compositions may be delivered alone or in combination with a probiotic aimed at improving hive health.

### Processes and Methods for Making and Administering Compositions

[0148] Embodiments of the present disclosure additionally include processes for making the compositions disclosed herein and methods for administering said compositions to the beehive and/or bees.

[0149] An exemplary process for preparing the bacteriophage component of compositions disclosed herein, includes isolating the bacteriophage (from an environmental source) and characterizing the bacteriophage.

[0150] In general, “characterizing” the bacteriophage can include measuring its lytic activity to ensure that the bacteriophage is a lytic phage and not a lysogenic phage, measuring the host range to ensure the phage has a narrow tropism that includes a desired bacterial target, optionally passing it through Varroa mites to ensure that the bacteriophage survives conditions of or internal to the Varroa mite, and/or sequencing the bacteriophage genome to ensure that the phage is not harboring any bacterial toxin or virulence factor or integrase gene, which may indicate that the phage can be lysogenic. During the characterizing process, any bacteriophage that fails any one criterion is excluded from further consideration.

[0151] In some embodiments, genomic sequencing of the bacteriophage is performed to determine how closely related each of the various phages are, particularly when those phages are tropic for the same bacterium. This additional, sometimes optional step, can beneficially allow for the selection and combination of phages that are as unrelated to each other as possible and to decrease the likelihood that the targeted bacteria can develop resistance against the selected phages. Thus, after identifying and characterizing a first bacteriophage, additional phages specific for each target bacterium can be included that are each validated as lytic, having a narrow and specific tropism, able to survive conditions in or internal to the Varroa mite, and unlikely to promote bacterial escape mutants resistant to the cocktail of phages.

[0152] Following isolation and characterization, the selected bacteriophage is prepared in any manner to be incorporated as a composition for administration to the beehive.

[0153] As discussed above, the compositions disclosed herein can be administered alone or co-administered with a probiotic. The administration dosage and schedule can be determined based on the desired effect and as known in the art.

[0154] In general, the method/process steps described herein can follow or include one or more of the following: (1) collecting environment sample(s); (2) setting up enrichment culture; (3) isolating phage from the enrichment culture; (4) purifying the phage; (5) phage titer test to high concentration; (6) characterizing the phage (e.g., using electron microscope and/or genomic DNA isolation and sequencing); (7) optionally performing a restriction enzyme assay/analysis; (8) performing a lytic activity assay; (9) optionally preparing a phage frozen stock; (10) optionally combining two or more strains of selected/suitable bacteriophage strains; (11) testing safety and efficacy of the bacteriophage (or mixture of bacteriophages); and so forth. In a more general sense, the methodology can involve: isolating and characterizing key (internal) bacteria from the Varroa destructor mite and targeting those not known to be beneficial to healthy honey bees; isolating and characterizing bacteriophages that infect these bacterial hosts; and testing safety and efficacy of the bacteriophages. Various illustrative and specific details of the foregoing are provided, below.

### ILLUSTRATIVE EXAMPLES

### Example 1: Varroa destructor Microbiota Isolation

[0155] Varroa destructor microbiota were isolated directly from environmental samples of Varroa destructor mite. Live mite-infested bees were used to harvest mites by placing bees in a jar having a wire mesh covering with a few tablespoons powdered sugar, rolling the bees in the sugar to induce release of the mites and then retrieving the free mites. Mites were then added to a sealed jar with chloroform, subjected to UV light for sterilization of their surface, and homogenized by sterile mortar and pestle. Sterile LB media was immediately used to solubilize homogenate, which was spread on selective plates (Cetrimide and MacConkey).

[0156] Cultures were allowed to incubate at 30° C. or 37° C. for 24-48 hours. Strains were sequenced using 16S RNA gene primers and standard PCR followed by Sanger sequencing for identification. From the colonies that arose on the plates, three bacteria were further targeted because they were not reported in published studies on the key conserved, beneficial bacteria in the honey bee microbiome, namely several species of Lactobacillus, and Bifidobacterium, Snodgrassella alvi, Gilliamella apicola. Frischella perrara, Bartonella apis and Commensalibacter spp. Moreover, Apibacter, Parasccharibacter, Fructobacillus, Lactobacillus, and Saccharibacter are also often reported at various levels (reviewed in Zheng et al. Lab Anim., 2018). However, even if the bacteria species chosen are found in honey bee, the strains found in the honey bee and mite are likely distinct due to coevolution with the phylogenetically distinct hosts. Isolated genomic DNA of these three strains was then submitted for Illumina iSeq sequencing and their partial genomic sequences were aligned to close relatives in Geneious version 8.0.5, and further analyzed (Table 1). These three bacteria include an unknown Bacillus sp. strain that is most likely Bacillus paralicheniformis (Bacillus sp. strain VdestructorMite01), an Escherichia coli strain (Escherichia coli strain VdestructorMite02), and a Hafnia sp. that is most likely a paralvei strain (Hafnia paralvei strain VdestructorMite03). Bacillus sp. strain VdestructorMite01 aligned 98.7% to Bacillus paralicheniformis (CP010524.1). Its 16S rRNA had homology (>99% identity) to both B. licheniformis and B. paralicheniformis strains. It was therefore further characterized by analysis of its Fengycin gene FenC as well as its LanM gene which displayed 95% and 100% identity, respectively, to B. paralicheniformis, making the likely species B. paralicheniformis. Escherichia coli strain VdestructorMite02 was aligned 99.9% with E. coli CP053607.1. Its 16S rRNA had homology (>99% identity) to both E. coli and Salmonella strains, however a BLASTN of the assembled consensus sequence yielded E. coli strains as the 50 top hits. In addition, PrmD was used to distinguish between Salmonella and E. coli as previously reported by Winfield and Groisman (PNAS, 2004), with the PrmD gene having 100% identity to PrmD from E. coli (AY725419). Hafnia paralvei strain VdestructorMite03 aligned 96.25% with H. paralvei (CP014031.2) and displayed >99% 16S rRNA identity with both H. alvei and H. paralvei. However BLASTN of the partial genome displayed >99% identity to H. paralvei strains and only ˜84% identity to H. alvei strains. In addition, Hafnia paralvei strain VdestructorMite03 did not encode the Mdch gene for malonate utilization found in H. alvei strains (Guys et al, Int J Syst Evol Microbiol. 2010, Shannon et al, J Clin Microbiol. 2011). Thus this strain is likely Hafnia paralvei. All three bacteria also grow well on Luria broth (LB) for mass production.

[0157] Without being bound to any particular theory, the genomic/genetic difference between the Bacillus sp. strain(s) and the Hafnia sp. strains isolated from the Varroa mite and known strains of Bacillus sp. strain(s) and the Hafnia sp. is understandable, given the unique form of life represented by the Varroa mite.

TABLE 1
Basic genomic properties of bacteria isolated from Varroa destructor mite.

| Bacteria | Assembled to | Coverage | 16S BLASTN | Properties |
|---|---|---|---|---|
| Bacillus sp | B. paralicheniformis | 4,463,729 | NR_137421.1(100%) | FenC⁺, |
| strain | (CP010524.1) | (98.7%) | | LanM(100%) |
| Escherichia coli | E. coli | 4,814,360 | NR_112558.1 (99.91%) | PmrD(100%) |
| strain | (CP053607.1) | (99.9%) | | |
| Hafnia paralvei | H. paralvei | 4,606,768 | NR_116898.1(99.7%) | Mdch⁻ |
| strain | (CP014031.2) | (96.2%) | NR_044729(99.5%) | |

### Example 2: Isolation and Basic Characterization of Bacteriophage Specific for Varroa Mite Bacteria

[0158] Bacteriophages were isolated from raw sewage through the addition of raw sewage to overnight cultures of each of the three bacterial strains (Varroa destructor mite Bacillus sp. strain VdestructorMite01, E. coli strain VdestructorMite02, and H. paralvei strain VdestructorMite03, along with fresh media. Cultures are allowed to incubate at 30° C. or 37° C. either aerobically or anaerobically for at least 24 hours, and then plated for plaques. Plaques are isolated three times by picking followed by reinfection of host bacteria. The thirteen final bacteriophage candidates are fully sequenced as well as tested for strain specificity against the other bacteria isolated from (inside) the Varroa mite. No cross-reactivity was seen. In addition, all bacteriophages appeared lytic through plaque morphology analysis. The basic characteristics of the bacteriophages are summarized in Table 2 and FIG. 1. The bacteriophages isolated against the specific Varroa destructor mite bacteria were named according to standard nomenclature, with vB indicating they are viruses of bacteria, following an underscore the bacterial species and phage morphology are provided (ie, BspH is Bacillus sp. and Herelleviridae), followed by an underscore and the common name of the phage (ie TimeGriffin). The bacteriophages fall into nine groups of related phages. The first group contains Bacillus phages vB BspH TimeGriffin and vB BspH Mawwa which are approximately 94% identical, the second harbors Escherichia and Hafnia phages Skers, Kelasse, and IsaacDaniel, all T4-like phages. IsaacDaniel and Kelasse display 96.12% identity and Skers is 83.51% and 83.6% identical to IsaacDaniel and Kelasse, respectively. The final group consists of Hafnia phages SarahDanielle and Zyzzx (90.83% identical). All other phages are not closely related, and three do not currently have any close relatives in the NCBI database GenBank.

TABLE 2
Basic characteristics of bacteriophages that infect Varroa destructor
mite bacteria (strains VdestructorMite01- VdestructorMite03).

| | | | Genomic | |
|---|---|---|---|---|
| | SEQ | | size | General |
| Bacteriophage | ID # | Bacterial host | (bp) | Phylogeny |
| vB_BspH_TimeGriffin | 4 | Bacillus sp strain | 148,525 | Lytic Bastille-like |
| | | VdestructorMite01 | | |
| vB_BspH_Mawwa | 1 | Bacillus sp strain | 149,014 | Lytic Bastille-like |
| | | VdestructorMite01 | | |
| vB_BspM_Internexus | 2 | Bacillus sp strain | 252,262 | Lytic AR9-like |
| | | VdestructorMite01 | | |
| vB_BspM_Dartukuta | 5 | Bacillus sp strain | 60,862 | No close relative |
| | | VdestructorMite01 | | |
| vB_BspM_AgentSmith | 3 | Bacillus sp strain | 200,223 | No close relative |
| | | VdestructorMite01 | | |
| vB_EcoS_Sponge | 13 | Escherichia coli strain | 44,887 | Lytic SO-1-like |
| | | VdestructorMite02 | | |
| vB_EcoM_SophiaRose | 10 | Escherichia coli strain | 139,943 | Lytic Rv5-like |
| | | VdestructorMite02 | | |
| vB_EcoM_Skers | 11 | Escherichia coli strain | 154,769 | Lytic T4-like |
| | | VdestructorMite02 | | |
| vB_EcoM_Kelasse | 12 | Escherichia coli strain | 167,034 | Lytic T4-like |
| | | VdestructorMite02 | | |
| vB_HpaM_IsaacDaniel | 9 | Hafnia paralvei strain | 167,265 | Lytic T4-like |
| | | VdestructorMite03 | | |
| vB_HpaM_Meifeng | 7 | Hafnia paralvei strain | 48,503 | No close relative |
| | | VdestructorMite03 | | |
| vB_HpaM_SarahDanielle | 8 | Hafnia paralvei strain | 86,185 | Lytic FelixO1-like |
| | | VdestructorMite03 | | |
| vB_HpaM_Zyzzx | 6 | Hafnia paralvei strain | 85,869 | Lytic FelixO1-like |
| | | VdestructorMite03 | | |

“bp” stands for base pair.

[0159] FIG. 1 illustrates the results of whole genome nucleotide comparison of bacteriophages that infect Varroa destructor mite bacteria using Gepard (Krumsiek et al., Bioinformatics, 2007) dot plot analysis. Diagonal lines indicated nucleotide identity.

### Example 3: Bacteriophage Efficacy Testing

[0160] Without being bound to any particular theory, Varroa destructor mites are typically seasonal, replicating at a higher rate in drone brood in the summer, and peaking in concentration in the fall (peak mite season in most areas of the United States). Administration of an illustrative phage cocktail directed against Bacillus sp. (e.g., Bacillus paralicheniformis), Hafnia sp. (e.g., Hafnia paralvei) and Escherichia sp. (e.g., Escherichia coli) in the Varroa destructor associated with beehives is effective in field trials, decreasing mite counts up to six-fold during peak mite season in the fall (FIG. 2). Although mite differences are more difficult to determine during the early summer due to low mite levels, administration of an illustrative phage cocktail decreased mite counts ˜2-fold early season in the summer (FIG. 3). Additionally, the effects of this early season treatment could be seen months later. Administration of the illustrative phage cocktail against Bacillus sp. (e.g., Bacillus paralicheniformis), Hafnia sp. (e.g., Hafnia paralvei) and Escherichia sp. (e.g., Escherichia coli) in, internal to, and/or associated with Varroa destructor that is associated with the beehive and/or with bees associated with the beehive in June 15-July 6 reduced mite counts two months after the first treatment (˜1.5 months after the final treatment on July 6^{th}) (FIG. 4).

[0161] FIG. 2 presents the results of field trials in which an illustrative phage cocktail directed against Bacillus sp. (e.g., Bacillus paralicheniformis), Hafnia sp. (e.g., Hafnia paralvei) and Escherichia sp. (e.g., Escherichia coli) in the Varroa destructor associated with beehives decreased mite counts in the hives by −6-fold when compared with untreated hives during peak mite season. Mite counts are per 100 bees and is based off of the sugar roll mite count. Both pre- and post-treatment counts are provided. Changes in mite counts are shown above the graphs along with p-values that are below 0.05. Difference in pre and post mite counts were analyzed by ANOVA with post hoc Dunnett's using untreated hives as the control with JMP version 14 SAS Institute Inc., Cary, NC. Hives were treated once a week or twice a week (biweekly) for three weeks in early season (Jun. 15-Jul. 6, 2020), and then again in peak mite season Aug. 28-Sep. 18, 2020. Mite counts are pre-treatment (day 0) and post-treatment 3 days after the final treatment for biweekly or 1 week after the final treatment for weekly (day 21).

[0162] FIG. 3 presents the results of field trials in which an illustrative phage cocktail directed against Bacillus sp. (e.g., Bacillus paralicheniformis), Hafnia sp. (e.g., Hafnia paralvei) and Escherichia sp. (e.g., Escherichia coli) in the Varroa destructor associated with beehives decreased mite counts in the hives by −2-fold when comparing hives pre- and post-treatment during early season. Mite counts are per 100 bees and is based off of the sugar roll mite count. Both pre- and post-treatment counts are provided. Changes in mite counts are shown above the graphs along with p-values that are below 0.05. Due to low mite counts and variability between hives early season, data was analyzed by ANOVA comparing the pre and post result within each single treatment group with JMP version 14 SAS Institute Inc., Cary, NC. Hives were treated once a week or twice a week (biweekly) for three weeks in early season (Jun. 15-Jul. 6, 2020). Mite counts are pre-treatment (day 0) and post-treatment 3 days after the final treatment for biweekly or 1 week after the final treatment for weekly (day 21).

[0163] FIG. 4 presents the results of field trials in which an illustrative phage cocktail directed against Bacillus sp. (e.g., Bacillus paralicheniformis), Hafnia sp. (e.g., Hafnia paralvei) and Escherichia sp. (e.g., Escherichia coli) in the Varroa destructor associated with beehives caused mite counts to remain reduced ten weeks after the first preseason phage treatment. Mite counts are per 100 bees and is based off of the sugar roll mite count. The post-treatment data presented in FIG. 4 was analyzed by ANOVA with post hoc Dunnett's using untreated hives as the control with JMP version 14 SAS Institute Inc., Cary, NC. Hives were treated once a week or twice a week (Biweekly) for three weeks in early season (Jun. 15-Jul. 6, 2020), and mites were assessed August 28.

[0164] It is noted that any statistically-significant decrease in mite counts can be sufficient to support the health, vitality, and/or longevity of the beehive and/or bees, preserving the beehive and/or bees and prevent colony collapse. Indeed, even a modest decreases in mite counts, can be sufficient to support the health, vitality, and/or longevity of the beehive and/or bees, preserving the beehive and/or bees and prevent colony collapse. In some cases, even abrogating the growth/expansion, reproduction, and/or health/wellness of Varroa destructor associated with the beehive and/or bees can be sufficient to support the health, vitality, and/or longevity of the beehive and/or bees, preserving the beehive and/or bees and prevent colony collapse.

### Example 4: Safety Testing

[0165] In addition to being effective at reducing Varroa destructor (population) levels, honey bee colony health remained stable or increased in field trials at peak mite season, assessed by overall bee count, bee activity, and new egg count as well as brood caping one week after the final weekly treatment (FIG. 5, in the comparison of the combined treated and untreated). These differences in colony health were even more dramatic preseason (FIG. 6). The safety and specificity observed herein is consistent with the expected differences in the microbiome of the honey bee (of the class Insecta) and the Varroa destructor mite (of the class Arachnida), two very different forms of life. The Varroa destructor mite feeds on the fat body of the honey bee, a discrete organelle separate from the honey bee digestive tract, while the honey bee feeds by foraging pollen and nectar. Even if bacteria species were targeted that were abundant in both the honey bee and the Varroa destructor mite, they would be unlikely to be the same strain, having evolved with two phylogenetically distant organisms which feed on very different material and have very different lifestyles. Microbiome studies have shown that even related organisms of the same genera usually harbor distinct microbiomes (different species and strains of bacteria) due to co-evolution of unique traits. The isolation of three bacteriophages in this study with no close homology to any bacteriophage in NCBI GenBank (namely Bacillus phages vB_BspM_Dartukuta and vB_BspM_AgentSmith, and Hafnia phage vB_Hpa_Meifeng) alludes to the unique nature of the mite microbiome.

[0166] FIG. 5 presents the results of field trials in which an illustrative phage cocktail directed against Bacillus sp. (e.g., Bacillus paralicheniformis), Hafnia sp. (e.g., Hafnia paralvei) and Escherichia sp. (e.g., Escherichia coli) in the Varroa destructor associated with beehives improved colony health during peak mite season. Hives were treated once a week or twice a week (biweekly) for three weeks in early season (Jun. 15-Jul. 6, 2020), and then again in peak mite season Aug. 28-Sep. 18, 2020. Colony health was assessed using a scale of 1-3 (3 for the healthiest) using industry standards for overall bee count, bee activity, and new egg count as well as brood caping one week after the final treatment for weekly (day 21).

[0167] FIG. 6 presents the results of field trials in which an illustrative phage cocktail directed against Bacillus sp. (e.g., Bacillus paralicheniformis), Hafnia sp. (e.g., Hafnia paralvei) and Escherichia sp. (e.g., Escherichia coli) in the Varroa destructor associated with beehives improved early season colony health. Hives were treated once a week or twice a week (biweekly) for three weeks in early season (Jun. 15-Jul. 6, 2020). Colony health was assessed using a scale of 1-3 (3 for the healthiest) using industry standards for overall bee count, bee activity, and new egg count as well as brood caping one week after the final treatment for weekly (day 21).

### Example 5: Administration of Bacteriophage

[0168] Bacteriophage preparations may be either liquid or dry. Any suitable method known in the art for applying or administering compositions of the present disclosure to bees and/or beehives may be used, particularly those which are acceptable and/or known for administration to beehive/bee pests, including but not limited to (i) combining the composition with feed and/or water, and/or (ii) applying or administering the composition as a spray, mist, aerosol (e.g., ultralow volume fogger application, surface acoustic wave nebulization, etc.), bait, trap, etc.

### Example 6: Mode of Action

[0169] The administered phage therapy may cause the Varroa destructor mite to become sick, not replicate and/or die due to lysis or death of bacteria and downstream effects within the Varroa destructor mite. These effects may include but are not limited to decreased digestive capacity of the mite due to contributions of the beneficial bacteria to digestion, decreased production of a vitamin or other essential nutrient, decreased antimicrobial activity of the targeted bacteria, or even increased antimicrobial activity due to bacterial cell lysis and the corresponding release of antimicrobials or stimulation of the immune system. Bacillus and Hafnia species from other organisms have been reported to contribute antimicrobial activity in several studies.

[0170] The administered phage therapy may cause the Varroa destructor mite to become sick, not replicate and/or die due to lysis or death of bacteria within the Varroa destructor mite.

### Example 7: Exemplary Alternatives

[0171] Various alternative steps and modified approaches to identifying, characterizing, isolating, purifying, and preparing bacteriophages for inclusion in a composition (or method) for use in treating Varroa destructor infestation in a beehive having Varroa destructor infestation will be apparent to those skilled in the art. In general, such methods can include one or more of the following: (1) collecting environment sample(s); (2) setting up enrichment culture; (3) isolating phage from the enrichment culture; (4) purifying the phage; (5) phage titer test to high concentration; (6) characterizing the phage (e.g., using electron microscope and/or genomic DNA isolation and sequencing); (7) optionally performing a restriction enzyme assay/analysis; (8) performing a lytic activity assay; (9) optionally preparing a phage frozen stock; (10) optionally combining two or more strains of selected/suitable bacteriophage strains; (11) testing safety and efficacy of the bacteriophage (or mixture of bacteriophages); and so forth.

[0172] Illustratively, the method can include collecting a (biological) sample containing (naturally-occurring) bacteriophage, such as an environmental sample from, for example, soil, plant (material), sewage, sewage water, or other environmental source. An enrichment culture can then be established for enriching suitable bacteriophage. The enrichment culture can include, for example, 25 mL LB broth, 1 mL target bacterium (from (inside) Varroa destructor), and 1 mL of the environment sample. The inoculated enrichment culture is then incubated (e.g., at 35° C. for 2 days with aeration). Following incubation, the liquid can be transferred from the flask into a cylindrical or conical tube for centrifugation (e.g., at 8000 RPM for 20 minutes). The supernatant can then be filtered (e.g., using a 0.45 μm filter) into another sterile conical tube and optionally refrigerated.

[0173] Various (enriched) phage can then be isolated from the enrichment culture. For example, the filtered enrichment culture can be mixed and serially diluted (e.g., by factors of 10) to a final concentration of 1×10′ PFU/mL. An overnight culture of the target bacterium can then be inoculated into each tubes of the dilution series (e.g., using 500 μL of the bacterial culture). The inoculated tubes are then incubated at 35° C. for 40 minutes. Following incubation, each sample is mixed with 5 mL of melted top agar and plated (e.g., onto petri dishes). The plated samples are incubated for 24 h or until plaque formation is visible.

[0174] The target phages or phage strains (or lines) are purified by picking a single plaque with a sterile needle and transferring to sterile media (e.g., LB broth). The inoculated media is mixed, incubated, and phages picked from a resulting plaque are filtered as before prior to serial dilution. An overnight culture of the target bacterium can then be inoculated into each tubes of the dilution series (e.g., using 500 μL of the bacterial culture). The inoculated tubes are then incubated at 35° C. for 40 minutes. Following incubation, each sample is mixed with 5 mL of melted top agar and plated (e.g., onto petri dishes). The plated samples are incubated for 24 h or until plaque formation is visible. This phage purification process may be repeated two or more times, as necessary (e.g., to achieve a suitable, threshold level or optimal level of confidence regarding purity of a (single) phage strain or line).

[0175] Following the purification step, the phage titer is determined. This can allow isolation of phage to an adequate high concentration in preparation for further analysis. The phage titer assay can be conducted, for example, by mixing 20 mL LB broth, 0.5 mL of an overnight culture of the target bacterium, and plaque picking from the last phage purification round that had been suspended in 100 uL LB broth. The flask is then incubated at 35° C. for 2 days with medium shaking. Following this incubation period, the sample is centrifuged (e.g., 8000 rpm for 10-15 minutes) and supernatant filtered (e.g., through a 0.45 μm filter). The filtered supernatant can then be used, as above, to generate plaques for determining the concentration of phage within the filtered lysate.

[0176] Preferably, the final concentration of the phage lysate is greater than or equal to 1×10³ PFU/mL, more preferably greater than or equal to 1×10⁴ PFU/mL, still more preferably greater than or equal to 1×10⁵ PFU/mL, still more preferably greater than or equal to 1×10⁶ PFU/mL, still more preferably greater than or equal to 1×10⁷ PFU/mL, still more preferably greater than or equal to 1×10⁸ PFU/mL, still more preferably greater than or equal to 1×10⁹ PFU/mL, still more preferably greater than or equal to 1×10¹⁰ PFU/mL, still more preferably greater than or equal to 1×10¹¹ PFU/mL, still more preferably greater than or equal to 1×10¹² PFU/mL.

[0177] The phage can then be characterized. Illustratively, phage characterization can include isolating the phage DNA using methods and phage DNA isolation kits, as known in the art. The isolated phage DNA can be sequenced using any method or suitable technology known in the art. The sequenced phage DNA can be used to confirm the lack of any bacterial toxin and/or virulence factor and/or integrase gene, and to compare with other phage DNA having a similar tropism for a relative genetic similarity. Genetically- and/or genomically-suitable phage can be selected for further characterization, analysis, and/or processing.

[0178] Phage can be further characterized using electron microscopy (data). Illustratively, 10 μL of phage lysate can be combined with 10 μL of tungsten heavy metal solution and placed on an electron microscopy grid and viewed via electron microscopy, as known in the art. The electron microscopy data can be used to determine phage morphology and structural classification. Morphologically- and/or structurally-suitable phage can be selected for further characterization, analysis, and/or processing.

[0179] Exemplary method(s) for determining lytic activity and tropism for identified and/or selected bacteriophages can also be implemented. To identify lytic phages, a target bacterium from (inside) the Varroa destructor mites can be diluted from an overnight culture to a concentration of 1×10⁶ colony-forming units per milliliter (CFU/mL) and inoculated with phage tittered to a concentration of 1×10⁸ PFU/mL, for example, giving a multiplicity of infection of 100. One milliliter of sample can be removed from the flask, serial diluted, spread over LB-agar plates, and incubated overnight. The number of surviving bacteria can be determined by colony count the next day. An additional 1 mL of each sample can be removed from respective cultures every 2 hours during the first 12 hours after inoculation then once more at the 24^{th} hour after inoculation to detect whether the phage was lytic and whether bacteria develop resistance within the first 24 hours.

[0180] The (cellular) tropism, or target specificity or infectivity, of each phage can be tested by measuring its ability to lyse a range of bacteria, from closely to distantly related bacterial strains. Illustratively, host range testing of bacteriophages that are initially isolated based on their ability to lyse bacteria from (inside) the Varroa destructor mites can be tested against two other species of the same bacterial genus and/or other strains of the same bacterial genus species. Furthermore, host range testing of bacteriophages against more distantly related genera or bacteria genus can be tested.

[0181] Spot test(s) can be performed by dropping 10 μL of the respective phage solution containing 1×10⁹ PFU/mL onto a lawn of specified-target bacterium and incubating overnight at 37° C. Results are illustrated by a positive indication corresponding to clearing of bacteria in the location where the phages were dropped or “spotted” on the plate. The clearance indicates lysis of the target bacterium and therefore tropism for the same. For example, different phages display tropism for different bacterial strains, while maintaining tropism for many (or all) of the originally-tested species or strains.

[0182] The lytic activity of the phages toward each vulnerable strain of bacteria can be further quantified by mixing, for example, 100 μL of 1×10⁹ PFU/mL phage with 500 μL of 1×10⁹ CFU/mL bacteria and incubating overnight at 37° C. with shaking. The overnight cultures can be serially diluted, plated, and plaques were enumerated on the incubated plates to assess each phage's ability to replicate in the host bacteria. Different phages display tropisms specific for different strains of target bacteria from (inside) the Varroa destructor mite and/or may be capable of replicating within and lysing different strains.

[0183] In some embodiments, in order for identified phages to be considered for inclusion in the disclosed compositions, it can, should, or must first be demonstrated that each phage can survive conditions in or internal to the Varroa mite. Accordingly, a calculated concentration of selected phage or phage cocktails can be administered to Varroa mites, followed by mite collection from which the concentration of phage can be measured. Phages shown by these tests to survive and replicate in (or inside) the Varroa mite may be considered or selected for subsequent development of a compositions.

[0184] Further in vivo proof-of-principle testing can be performed to determine whether phage can (1) cause bacteriophage-induced death or lysis of bacteria present in (or inside) Varroa destructor associated with the beehive and/or the bees, and particularly Bacillus sp. (e.g., Bacillus paralicheniformis), Hafnia sp. (e.g., Hafnia paralvei), and/or Escherichia sp. (e.g., Escherichia coil) in or inside Varroa destructor, (2) cause death of Varroa destructor associated with the beehive and/or the bees, and/or (3) inhibit reproduction, maturation, and/or growth in Varroa destructor or a population of Varroa destructor associated with the beehive and/or the bees.

### Example 8: Genomic Sequences of Illustrative Bacteriophage

[0185] The Sequence Listing accompanying the present disclosure and submitted herewith forms a part of the present disclosure and is incorporated herein by specific reference.

### CONCLUSION

[0186] It will be appreciated that systems, devices, products, kits, methods, and/or processes, according to certain embodiments of the present disclosure may include, incorporate, or otherwise comprise properties, features (e.g., components, members, elements, parts, and/or portions) described in other embodiments disclosed and/or described herein. Accordingly, the various features of certain embodiments can be compatible with, combined with, included in, and/or incorporated into other embodiments of the present disclosure. Thus, disclosure of certain features relative to a specific embodiment of the present disclosure should not be construed as limiting application or inclusion of said features to the specific embodiment. Rather, it will be appreciated that other embodiments can also include said features, members, elements, parts, and/or portions without necessarily departing from the scope of the present disclosure.

[0187] Likewise, any steps recited in any method or process described herein and/or recited in the claims can be executed in any suitable order and are not necessarily limited to the order described and/or recited, unless otherwise stated (explicitly or implicitly). Such steps can, however, also be performed in a specific order or any suitable order in certain embodiments of the present disclosure.

[0188] The present disclosure may be embodied in other specific forms without departing from its spirit or essential characteristics. The described embodiments are to be considered in all respects only as illustrative and not restrictive. The scope of the invention is, therefore, indicated by the appended claims rather than by the foregoing description. While certain embodiments and details have been included herein and in the attached disclosure for purposes of illustrating embodiments of the present disclosure, it will be apparent to those skilled in the art that various changes in the compositions and kits disclosed herein may be made without departing from the scope of the disclosure or of the invention, which is defined in the appended claims. All changes which come within the meaning and range of equivalency of the claims are to be embraced within their scope.

The application's sequence listing, which the Patent Office published only in electronic form, follows.

SEQUENCE LISTING (13 sequences)

SEQ ID NO: 1 - DNA, 149014 bp, bacteriophage
cctataacggcgtgaaatcatcgtcatcgtccattgagttgaatagtgcgataccatcatctattgcttgtttatctagatcgcttgtattgttatcactcaatgcgttgttatcagctacctctggtcgatctttgtcatcaatagctttcttaccttcgtaagacaatcttctagccttgtcttcagcttcagcaattctttgatttatgtattgttctacttcagtttctcgtacaggctttcctccaccctctaggtagtcgttatactcctgtagactatcaaacttcgtatccaagttctcaaggtcttctgatttagtaatctcttgaacctgtctataaatttcatctgggtcatgatctggacgaagaatttcccactcaccttccggtttgctccatacttcttcatcgaaatcatcatcgtagtattgagcatctacagtgagaccttttctgtggagttctgcaattcgagcgtcttctaccatagactccattataagctcaacctgatcatcggtcaggtttctaaacctctcgtcagtaggtaggacgttgaatgttttcataatcatccacaggttccgcatgtaaggtactctagctaatctcgtgtaccctcctagcttctttacctcatccttgaaatgtatccagccaacgctggaaatcaaccccaatcttataaagaatctgtgcgttatacagattgtcttcattttttagaaaatcaggtacctcaactccggtaacttgcaaggtagctagtgtattaaagacatataagtagtattcactagcgtatccattagtgccttcaagatagcgaacaacctttgcatgaattttaccttgttctagaatgttaggtgcccgcactttcaatttaaatttaagttggagatcaggaaaatcgtattccttctcccacacgtcattaactccttgaataatcctttgtatctgtttgacctgtttctcttgtttttccgcttcaatttcttctcgggttttctttgtagattcaaaaccttcgagttcttgttcaaagttatcagacatacttactcctcctattgttagtctctttaataatatagcagtagtttgttctctatttatattataacacacaaacggctattaccgtttgtattggtaatagccgtgagtaactctttggatattgttatcgtactgcgtaacttggctcatcagtgcataaggtgagtttgtcggtactcctttttcttctaaagatttcataatgtctttcattttaacaggcatccctgattctttaagtatatttgcaacctgcctagttacctgcttaacgtctctctgtgacgacctcttaggagcttcggacatgtctacaattgcgacacttttaggtttttcttgtttaacttgacttgcactgttattatgtctatcgatagcttcttgaagagacatcatcgctgtttcttttttgttactacttgtttcttctttagacgacttttcatagtctctgtcatctaattctcgaagtctattgatgatcatattgtattcttctagtagtcttgttctctcttcacggatatattttgcatgttcttctagagctgttctttcatcatagactttttgcattactctacttcctccaaccttttaataagttctggtaaaataacatgaatcaacgcttcgtcataagtcgtagttgggcggttaggttttctacaatggctcttgtagtaattagcttcattaattaatgcttcattcgttaacttcggaggcagcttgtcttgggcatagctgttcattctcatatctgctctcatttcaggtgtgatagatcgatcttcaaactctgttatatgcttcgtctcgtctccaaagttaaccaccatagaattatagatttcttcttgctcttttttaaacttctctggtaatctaaaccccatttctttacctcctagttttttcttcagtacctattatatttcaattaatagggttcgtcaatatattttgataaaagaaaaacaggtgatataatcacctgttattttaacactttaacttttagagtctttctcccaaaatctaatgcagcacctttatctggaatgaacacatcgattcgattacctttgattgctcctccggtatctcctgcaatatattccccataaccttcaacgtatacacgagagcctaaaggaataacattagggtctacagcaattacacgttggtttgggttagcccttaaatccaacccggtggcagttacaccggagcagcctgcacagtacgctgtgtatgcggtagcgactactgtaatggattgtggttggttagttgcaacctcctcatttgtaactggttttttaacctgtttcttctcgacttttttaaccttttctttaaccttcttctctttaggtttattatcttcaacttttacctctttagacttctttaacgaagacaataactctaggttctggtatgcggttccagtataccctttaataccaattttctctgccaaacctttacggtggtcgaagtcgaacctctctccttttgatgctaagtagtctactacgctgtaagggctcgtttctgccgatacaacccctgtcccggcaaagactgtcccaatagttacggtacaaagtacgatgccctttttaattaaactcatcaaatactcctctctgtaaatagcatgttttatgttacgtgttataatgtaacacataaacacccggttatagccaatgttacagtattgtaatttaaatgtaatataaaaagggagaccgtaatggcctccctatatttctttaacctcgaacgtttgcacttgttaagaagtagaaacgtgcttgctcagaggtgatttcaccgacactagtagtctcattgtatgtatcgatagagcatccacgatatgcgataacaacttctttagagtagttgtcataaagaacaatatccatgatgtccatttgaagaacttcttcacccaaagcagcaaagcctaatttggctaaattctcttttttcatccggaaacggtctaccgttacactaccttcatatctcaagtatacgtgttcttgaggcatgatagaaccgatctgatagactccagttgttccgaaactacgttctgctgagatagactgagctcgtgcgattggtacgtttttaatcatgaagtacaccgtattagcggaatgtactgattggttagttacacttgccacagaaagtcactccttcatttattttataggtaaggggagaatatctcccctagatcattaggctgtgagttcttgatcttcgtaagtgatgtagacgttgatgtaatccaatccttgagaaggttgaactgtgaagctgattcgagcaacgttaccagagatgacaacttgaacatcatctgggttgtagtctacgatcaagccgtcaacattcttttgctgatcaaggaaggactcaacacggttcttgatgatagaagctgaagtgcttcggattctagtaccgatgtactcttcatcaagcactgtacgaatctcagttgttaagaagtcagaaacttctccaagagatactcggttctgtactggctcgctagaaatgttataagtagttgggtcacttacaacacggaagtgagaagaagtacgtgtccggacaaactcagtcatgataattccagagttgttcaactggtctaactgatctccggtgaacttacggtcaagagcttcaacgttcatatgtttatatgtaagtggttctcctacaggaagtccacttgcaatacctgcgatctgagcagcgtacatgtaagctggagcattgtagatacgaccgtctgacattctccgagttacagaatccccaaccaagcttacacgggcgttacggaggttcatttgacgacctctcaagctctcgatagactctgcaaatccgccaccaacaaaacctcttagttggtttccgttgttagactcatcacgtaagaactgagagagttctccatgaatagctgcgttagaagacaaaggaacgatgtagtaagcaccgaggtcagcaatcttactgaacattgcagaccatgacgcaggtgctggctcagttttagctcctgccaagtttgttacagggaacgtatcaggcattgctttagtccgatctacttcgatagcgatataagggtcgttagatgtttggtttaccaagtcagccgccactgctgtaatagtaacaggacctgctttgatatccgcagcatctactttgtcaagaaattgagtttcaatgttcttgttaccgccaagtggattcatcttagcttcgaagtcaggaaggttgttgatatcatttacaagtacgtttacgtcttgatatacaccttgacctaattcgtaggtacgaagtgcttgcatactatctgcatcagcaccagcgctaagaacaagtttagtagctagtttagttgcagaatccacttctactgatacagttgcttgagcttcttcacctttatattgaacagtgaagatgttaccgatattgtcgtaagtttgctcataacgctctttagtgaagtacacgctgaaacgtttagagtttgtgatcgtgttgtcgctgtattctacttggatgctattagcatctgcaccgtagagtttagaaacaaacgtcaatgcgtctttactaagttttgcttgagtagcttcatctgtacgtacagcgtaaatacgtccagctcccggcatgttaggagaagggttccaagccatttcaattgcatctaaaagctcaccgccacggaataaatccctagcttgagagaagttagtaatagcatgaggtacttgtggctgtccgccagtagcagagcctaaaaggactaacggcttttcacttgctacgtttgcagagctaaggttactagaatctaagaatacttcagtacgagggcgttctctgttaaatccgtatgatgttgccatattttatatcttcctttctatttgaaattattttaattttagataagcttttagctcatctacaaaaacctgctcatcacgttggtagtgacggccactcattaaagccttaaatcctgctgcctgcattttattcagttcaaacaacgggatagcagtttttaagaatgtatcaatatgaatgtaaggtttaatcggtttaggtgctttctttggctttgagacttgctctgtttgagctttgtcttctttattcactttagccattcgtatcactctcctctacatcgagtctaacgttaacattaatctttttgaggaagtctactattggagagtctaaactgtaggatgaagtataggtaacaatagattcccgtccatataaaatctcagggttcttaccttcctgctctccactgaccacaacctcttctatctggccaaactggatgttttgtaggaggaagttagtatgctcctctttgctggctctcatcaggattaaaatagccttaactactagatcgagacaccttacaacatccatgtttgtagatactaccaatattgaatactgctctttggcagtgaatcctttctttaaaccaacctcgtcacctttagaagatacgtagtcaactactacttctaaaccaactagttcaggatcatacgtgaagtaaattttatttccctcgacagttacattatcacttcgagagaaagttatattctccacattaaaatcgcctataggcttggatacttcgataaacaggttcttgttattttcgtctgcctgtacaattgactcttcttttagtctttcatcctctatgtaactatagactccttctaagttaccgaggctggggctgctctcagctccctctcgaagaccaatgtatatggcgccttgttgggtctgcttatcttgcggcatggtatagatgacaggtatttcttttccagactctccggcatacttctttataaaattttcagccacatcgggctgtatgccttttaatatttcctctataatatagcggttcgttaagataattttcagtttgctcttaatttcttcacgtaagtatgtatcgatactaggcagcatgtgctaacctcctcctatatgtctatttccatccattcttcattttccacttgatcagtctatccacattcttgataaacgtttttgaggtatcgtctgtgtttactctgcttcggttgataatccagctattagcaggagatttatctgaaacggttctataagccgtgtaagagtgtctatccttaccgatacgcttcttcgtgatgtttttagacttaggtgtgtagttaagcatcgtagcatctgaattacgccttctgtcatacaaataatcagatacgacagttctttgattgtttgaagacatgttgacctgtctaagctggtcgtacatccttcttgacatgcctttctttttccgtgagataggtattcttaaataccatcctccaccttttttcattttctttttgctactctgtgcaaaataaggtttaaggtcaataacacctagtttatttaaacgagcttcagtaacctctaagtatttaggtttacgagttacttctatgtcactaggacgagagctattaatagcttccatcccggcattaagtgttttttggactaaggcgtttccgaacttctgcatagtggattttgtagaggcgttgttctgaaatagcttaggacgtatagattttctccccgccattacgactctccacctgtatgtctaaagaatccattaagaccatcaaccgcacccgaacgttttgtgtcaatcatttgcccggtgtcttcatcaactccaagtgaaaacgcctctttatctataaagtaatcttctcttttaagaagtaacttctgctgagtctttatgagttttccactctgatctctaccatagcggtgttcttttaataagtccgatacaagataacgcagtgttgtggaaatattaagagatacgttctcacccagtaaagactcattcggaaaaaacatgtttttatctctatcgaatcgataatcggttccttctactagctcacggtccattactaatgcgtattgaatttcctttacatcatatacaaggtagaaccctctttcgattcttttctcagtgacatcaaatataaagtgctgagtaacttgaacattcggtagagttatccgatcccggaatgcaagacgagtctctcggtcagccggagtaccaattgcagtaccagagtctacaataccgatatctccgttaaaaacacctttctcctcactctgaatgagcatatctatacctgtaggagggagaaagcctatgccccttccatgacatctaggacaagaggggttaggctgtctagtggccttattcctacaaggacatagataggacttctcccaaagaactggcgtagacatagaccatgcagcggtatctagagaatctggtttaaaggtggcataagctgtttggtttaaaaatgaaggacgttctgccatttaatctccctcctttgatcagacaatacctaagttattgccgtaataagatttaagccctttagttaagtcttcaatgtctttatctagctgtgctatatccgcagaagcagccccgtacatcgcactctgggtggtatcaatactttgttggattccatcaatactcaccgacatgcttgcgatacctgctccaagaataagtctcccccattgctggaatacttctttaagagctgtcttgattactagggtccatagatctgggtgcatttctagctgattggttacccctcttcttttcggtggcagcattcctgcaacgtattctacgtggaatagctgcggggcaaaattacttccgactgtatagggtagacctgcaatcatagggtacccggagtaagcttgactaatgtttaggttattgtacccaccagacaggatcatgttaggcaacatctgaatgtgtcccgggagatggtagattctccaccacgaaggcggataactatacaccgtgttccctccgtactctaagcgaaccatctctacttgtaacacaggcttttggtttgcgtgaatatacataaagctgttaaaatcattttggtagaaatcatggtgctctctaacaaaccgtggaagaattacaatgtctagtgacttctcgatctgtgctacagcttgctcaatcttagcctgataaaacgaatcgggaaggtgttctcctgtacgagggtctgtgacactgataccaaaatggtttgattttaccgcatctactgtaaacccgtaatctgctaaggtgtatttgtctacttctgaaggatcaattactttagggttactatgtccgtaagggtatcctgcactgttgtctgtggtcattacaattcaccccttacctttctaattatttttcttccttcttcgttgttttctttttcttaggttgagttttcttctctttaggctcttctttagcctcttctacctttgcctcttttttaggcttatcttcaacgatatggaagtttggaagtttacctagaaccttctcttgttcaggtttaaggtctttacactcgcctttttcattaaatgaaatttgtccgaactgagttgcgacctgtttatttgcaagtaattcattaactaacatagaataatctctcctcttttattttttaaataaaaagggagcagataatgtgtctgctccctattaattttttaagctattcaattttatctctatatacctgtctattattgaaagcttcttacgtcagcggcaatagcagggatgtatttgacgtttttgatgcgaacccattttctaggagcgtacagagcaagggcaccgtaccataatacagtgaacgtgctagtagcgttcatacgggcaagatcaagtttcatcattggaagaagttcgagcaagctaagaactttagggctcatttctccaaggaatacatcagttgtctcagggatattttcgttacgatcaacgaacacgatctgaccagcatcgttagctgctgacagaggtacacgagcgatcaagaagtaatgacctgtctcaagacctttacggtagattgccacatattgtggttgagcttgatacatagactgtagagatatagtaagttctacagagtctgtagcgttagctacgactgctgtagcttccgcagatggtgcagattcagcttcgtcagaatgtacaacaactttgtaagactgagttgtgaggtcttcttgacggaattgtcctttatctccagttttaacagtagcagctacagtagctggaagtggagcgttagcttgtggaataacgtcctcgataaggatgttatcgttctccatgattgtagagccatgaaggttgattttaccacgagcagaaaggaactcagttactgcaaaaccagtagacataccttctttacccggcatcaacgcacgttgacgatcaagcaagctgttagtgaagtcagcttgaacaccgattggcatgaatgcgtcagttactcggccgtaacctttacctacgattacagcagcttggttaaggtctgcttcagtaagagtgcgtccacgaaggtccattacgttatgtttttggtcgataagcttgtgtagaccatcgaactctactccagattgatctgatgtgtcagcagaaaggtccgcatccccgtagaagatagcccattcgatagacttagcgataacagcgatagcatcttctgtaagaatagtagtcggatcagttaggttgttaacaagagttgatgcaattgaaatttgttttgtatcactcaagaacttcatttgtacggttttttgacggatgttagggtcgttgatagaagctactcctacctcacgaacgaaacggctgtgaccagttttaccgtgttgattaaatacagcgtacttagcaacactgctgctaacttgttgtttagcgatcattggatagattgtgaagtcttggttgccataagccaacatcgtaacttcgtcttctaggaattcacgtcttaaagctgctgcgtcatgttgagagtccggtgtaataccgtgaccagttgtaaatgttttcgaaatgatttcttcggctgcttgagggagcttacgctctactttttgctcttccttactcatttatgtatcttcctttctaattggtttatatttaatttagtaatgcactttgttatgtactaaagagtagcagaggctaggaggaggaacccctgctacaaagcatcttatatgctcacatcattaatataacacttcgttctataattttttaattttcgagattttttacaacttctctaaacatctctatatcttctgctgttggaacaccacgttttacacgttgtactgcagctcgaaggtcctctcggtaccctaagtctaggttagcattattcttaatgtagtatttgacaacatcgctaatatgctcttgaggattaaacacttcttcagcttcagctttatcttcttcaacaacatctgcgacatcttcagcagatttagatacaaactcaactgctttaccttctggctcttcaataggtttggcgctcttttcaacttcttcaactacttcttcgtcttctttgacgctttccccatcaatagcaacctgaacattttcctcagtcttagataacttttcaagaatgcttcccaaagatttttcaatcttatcaaggcgaccttctaggttttcttgagaaccttttagcacaccaaaagatttaacaacagcttcaaaagcaccgataaaatcagactcagaaacaacgtcctcttgactagacttttccacttcttcaccttctttttcaggctcagatacttctgcctcttctttaggttccgctttaggctcctctttagattcctcagcttcgtcttccttctcgggttcttcgtctttagaatcctcttctttaggagcttcctctttaagctcttcatctttttcagacttttctacagcctcttcttttttatcttcttcagcaggttcttcctctttaggttcttctttagactctgctttaggatcttctgctgaatcttctttagccgcagcttcctctttttcaggttcaactacttctactggttcctctactttttcctcagacttttcaatctcttgttcttgcaacttctctaaatcttcggtaagtttagcaaacgattgttttttacccatttagtcatttactcctttccatctgttttattgctctcttgcataatcttatctattttagcgacagcctcattacgagagtaccctttaaacaattgaaggaacattactgccgcttcaggagcgtatctatccatagaatcaagatagtctccaatctccttccacaccttttcaaactcttgagggttgtcgagcattttataggaccaagataagttatacaggctacgagcaaaagtttcggctcttagagccccaccattgacttgggtgtccggtgtaataccatgacccgccagaaagcttttcatgaaagcttcccaagtagcattcggattagcagggttagttgttacagctacgttagtgatgagagttttcttaatgattcttggatcatctttatctcgttctttagcgtagccttcaattgaaaaccctagctttctatccacacctgattttgcaatgttattagcaagattccacatgcttttagcataaggattccctttgtagagcttggcttcgacatatagtccaacgttagggtcaacatatgtacctttagtaggggctccaattttaaaatcttcgccttgttggtgctcgtagttaatatatccatgctggataaaataactaatgtcgattccagaagggtctacaatgtcgtcctgcaagtctaaatcaggagtggtagcataaccacgaagataccaagatttctctgaagtattttcgttactctttttgatcgagtcacctaaatcaataggaacaaatagatcgactttaccgtttatagtatgcagggttacttcctcccttctataataacacaaattgtaacattgcctgatgttatagacttcattgctgtagataatatagcagaagcactacttagttttatttttatcaactttctcatacataataggacctctacaagacggacaatcccatccttcgagctctctcttcgtagttttttcccagtcacatactaagcagtagttcctaattaacgaagatttcattatatttgcctccttaatataacttgggaggattaaacctcccagtcatttacagtttcaccattttcccctttaccgccttgcggtgtagcgttggtgttgttttctccctttaattgaccgtccttgccaacattttggttgtatgtatctttgccattgacattgtctaagtccccattataacctgtctgctgagctacgaattggtgcatttccatctgttcttgtctctttagctgctcttcctgcattagctgaccaagacgttgtacgtggacacctgaaaggataacgtccccgccttcaatctcagggtaaccgagttcagcacgaacatcattaatcgtaagaccaattttagccttcgattcgagcatctcaataatttcgttttcagttttaacgtcgccaccgacaaagttaaatacatatttaccgttcccaagttgagaaacgatgtatttatttactgcgtcctctacgaacttcagtaaaggttctaaccctttatctttagagttacgatacttctccgcagtgccgccctcattcaacgtgttacctgagtgccctgtagcccctccccggttagggaagttgatctctgatggatcaatggagaaaattgagcagataacgttaatcaagtagttaagccacttctcaaactccatgtctttagacgattgcgtcatattaacaaacttaacgtcttcagcagtgattacaggaattttccaagcgccgtttaatccgctaaacattgattgccattcacgtctaaatgaagttaaagcttgatgagattgctcttgtcctgttttaatctgaaggaggcctctggtcgttccaccttgcgcaaagaaccgagcgttgaagacctcagtgttctcatggtactgaagatggtttaacgctacttctaactctggatacccatacctacctacagtgatgtctgtacgagggttatgtacttcccatgccatttctttggctttaaaacttgctacttttctatcgtctaacatctgaacatatttataagcgttctcacctttaggctctttacccttatcatcaactgcaacataaatagttgaagcgtctaccgccttaaacttgacgagtttatcagggtcttccttgtcataaataagctcaaagttaatcttgtcgtatgtaagtcgatcccgaactattttctttacgaacgttctaaatgtgtcgtttgtaaagctttgagtaacccctgtattctctaaaaacttctctatctcttttatctttttcttatcgtgagtattctcctcagctaaagggtcttttagacggacctcataaccaatacctttatcactgtatctggcaggtgtacaaaacagagaaacctgattgacacgggtattgataattgcgttgaggatgatattcttcctagagtagtgttttagagttttaaagaggttggctgtacctagtatggaaggtgcttctttatagtccgggttcatagacaaattacctagcagcggttcttcgtacgctttaggcttaggatcgttcttacttttcttaatgtactctccctcaatttcttttatcgttacagacagactctcatctatctctttgacatcattgaggtgagacgcaaccgtcctactgtcgttgtttaggctgaaccagtctcttaaacccatttgtttatcacatccattctacttataactttcaatcggaaatttaaattccttaccgtcaaaatggaagctatgtaattctgtatctttcgagtacttgaacacctttcgactattcataacgctctcgtagctttcagatacgggttcccctttactgtccatcagaagaacaagatcatcgtctatgacatcaataatgagtcgtctatctccgtctaagacagagtaaacaaatacgttctccccatcaattgatcggtaatagctgacaatctctatccagttcatatctccgatggctcgtttagcttccatccattttgtgtcttcgttgaaagatgccatcatagcctccttctcatatgtataatatagaactaacaagtctctattttaattatatcacataacactggtgtccttatgattagagaacgacaaaaaacctcacagttgcacctgtgaggacgttttactttagttagttgaaacactttttttttagtcaaatagtcaagtcaaagtcaagttttataaattccgctcttagaccgaggaatctcacctcgtttaccttcgctttacccgggacagcggcagataaattatactcatcctgagcggtgacatctgtggtccgcatagctacgtaaaaagctagaggcgtgatgcctttgttgtttgatcgtacgaatctagtgcatgttgttctagcgtatctctgtctagtgaaagtaacaaaacaggagcaacgagttcaccgttgaactagttcctcattaacatcgcattcacaagttgaatgagatggatggagagggaaaaccgaagaccctctcctgagacattcttgtctgcccttttcaggttacacgcccttatcaagatacaaagcgtcttgctcgctcgtctcttctttttgtgtggttttcccagacccgtgtaaggaggtacacaccggaaaataagtagttctgtagttctgtagttcaactacagtcgttcgggataaccccgaaccctttttaaaagaaggtaagacgcatccgacctccttaggtgcaatccgaagatatacaccgcaatcaagataatggtaccctaacccttcgtcaagtacctgcgtaagctccacagttctagcgcttccgttccccgtagccctaacccctaaattctagctacacccttagccccgtacactaaggttcctctgcccctaaccctacatcaaggcaccttgctctcgctccacactttcttcagcttgagttcccattgatatttattattcggtagaatctttcggtagtttgtccaatagtcgtacacctaatccggctgttttaggttcgtcaccttcctgaagttcactataggaggctacggcgtaggcatccacatccggaagataatagattatgcgatgaatgttatcattaacaactccgtctctgtttatctccatctcataaacaatttcaggatatatcacctgtgtctctttgactccggttcctttatagttcagagggttcctcagagggtctctgaagttctttaagtagctgtcctgctcaaaccagtatctccgattttcaacagggtctacatatacatggacagtagactccacaggcataaacttgtcgtacttgaagatatactttacttcttggaacaaaaaaccactctcctaaagtattttatattggagcatgttttaatacctactactttaagtaagtgagatcatttagtaaacacttacagaaggttcggtatagggtgacatgcttaccttcgaagttttcgtacaagaggttcacacagccctgatgtacaacacacatttacacgtataatactgaataactcacacgtagacaaccatgaaaggcacggcttatttacatcatacgtgggtttaaagggtttaaaaaaccctcatccaatacacatgtttaacatgtactcgatgagaatttgtaagggagccaagaaagggggcgaataatatgaaaggaggtgggaggtgatatgggaagctcccttacatctctattataacatattctgatgttataaagcaagttatagttaaaaaaaattaaaaagaaaaattaagatgggccatgaagctgaagaatagaattatagaaataagcatccaacctaagctgttttgtttgtctacctttgaccctttgttttttatttctgagagtagacaatacccgtgacccactgcacttactaaacaaccaagcatacaagctaagataacgtatagcattttagcactcctcattttgataataaaaaaaaataagctcaatgaatttttgacccatcttctcagagacagggatttttgttctaggaggtgtctatctctgagaagtttatagagtcaaaatacggtgtgtattcattgtcaatttaagcttaattatactataacatactttgtatctcttgacaagctttaaaacgattttttttattttttttttctgttcatgtcattccactttattttcgtttcggacgtccatctatatatcaattctttattcttattctttaatatttaatataaataatataaatatataatacagagcagataaaaattaaataagacaaaaattattttaaaaaccctataaacccttatataccaagggttaaaaataggacaaaaagttttaagacaacaaagaaccttgagtcaggaatacattatgtctttctgtctagtcagagattcagattgaaactctgtttaatttcattaatgtcctattttagactcaggaatatcaataagaactaacaaatttctcagaaaaaatgtcacattttcattttaaccctcctgtattatttattctttattcttatatataatatataaataattaaatacagagtggataaaataaaaataagcaccatttggtcaggaattactcacaagtgttgatgtatcaggtgttgaaaatatgacaaaaaaaaagtttgaaaaggatgttgacaattagacaatgaaggtgttaatattaagtcaacaacaaaaacgaacaatttctcaggaggaatatcaaatgacaaacgcagctgtaaccaaaactaaaggaggaaataaaatgagtaaaacaccaaagaaactcaaaaagtacagaattgatgcaggaatgacaatctatagccttgcagaaagaatgagtgttcatccatctacagtaagctactgggagaatgatcagaagttcccaagaaggggtaaaatggagcaattagaggatatcttcaatgtgagttggagagaactttttgatgacctttcagaagaagagatcaaggagttagagaaacgtgaaaacacatggttcgggagggaataataaaatgaaatacacgaatgacacggatattaagaatataacaaaagcccaagaagaaagagatggacttctgactagcttgcaatatgctagacttacttcatacgaatcccttaaaaaacgactaattttagatgttctagatcggatagtctatgagttatacgaagaccgtattaaagaagaaaagaaaaataaaagacgtgagcagattaatcaggacttagaagatgctatggacttagaatggggatcaggttacggagatttttaaataaaagaccagacaaaacgtctggtctaattttaatcgtatgttacttttaggctaacaatcaattcagggtttacatataccccttcatccgggcctcctgctgtagaagtaacaccgagaagtgttcctcgactacctcggatgtagctggcaatcagagataccggattgtcaggaatacctcctacgtctaactgagagtcaagaacaaaccattttgaaccgtctaccattgtgatttctaacgtttttttccttgccatacggattaccgcctttcttaattttcatttattttcccatagtgttgaatatgtaagtgatgagtcctccaagaaaagccattaaagctttctcaacaatatccctctgcttatcattccctttttctcctttttcgtctagcagctcaatctctctttgcatttgttcaatcctatagaacaggtgggactgtttctcgctatggatagccatgtctttatcaagagattgaacgatgtctctgaggtcattgaccacgtttctaagctctacagtgtccgttttatggttctgtagagtgttttcgatttctttcagcttttgcataatctcattgttttggtaagccactaaaaccccacctttctttatttgtcaaacagtttagtccctctctgtcctatagtgtccagttttgtattgtaattagctaaaaagtcttttagcacttgcatactatgctcgtctgctactttcccgtagttagcctctatatctattttgaagagcgctttaccatgctcttttaggtctaactcaattaaaacacatttgtcagggttgtcgcttttgaggtattgaaaagtgaagtctactaatagccctaaagataatagtctatggatagtgtagacgtggaacactgacctactctggttcactatatcactaattaatccccaaaactcaagtctaattgtgctgtggtacttattttccgttatgttcaagatttagtctcctttctgcgaaccgccgagataagagaagccccgatcagtaaaagaagcatcccatttttagttaagatggagtcgtacataaagttataaaacaggataacatctgatataatagagatataggacactatgataaacacagatgacttaattacaggcacaataagcctataaactagaccctgatagagtatccgggatgttatatatgacacataaacaatgagcatgtaaagcacagtagttattaatacacaagcaataaacatgtatatcatctccgccttatgattctttattaatataagactttgcagtgggagtttcttaatattcgttatcctttatattatatcaaaagacactatttattgtggaggttacacggatgataaataaactaaataagttctatattaaggtcttactcgtttttgtagtagaggcggttgttgctttatgtacacacatgttcattaaaagtgtactaaatttagaccctccgctattggtgtacgtcatcgaaggatcagtatttgctatcatcactgtggtcctgtatgacaaactattgcaaaagaagaaaaagagggttgaaaaagagcttaaagaattgaccgatgtggtttttaaaaaatatgacaaaacaggaaagtaggtgcgttaacggtgtttggattaacagaacaagaactcgacaactaccgtagcttcgcccaagattttgcggtacaggatttatcgccaagtgtggttacagcagctcaaattatgacacctgcaactcaagagaacggagaaactgttccggatatggagtttattgagaaattggtaaccgatatagagacagtagctactttaacagtttcacatatggcatacgattacgcccatcttcagagtgacattaacctctctgaagacgaaattgtagagaagctcgaaaacaaatatgaaacgtatgttatcaatcaatttatcaagtacggtatcgtatctagttctgatgctgcaaatgacattgttattcagactttgcttgaactaccttacctctattccagagctgttgaagatgattctttcgatgaagattcttttcttgaggagcgtctagaggcgtataacagctatatcgagaagtattatggagatgctaaggaggaggaggatgacgactaagaaagaagttgttgaaaaaagaaaaagtttatttgattcccagaataaaagatacacgtttaaaaagggggataaacggattcatgcacctcgtctttgcgttgtgtgcggtcgtccgctatcttctttaatactgaatgataacaagtacattgttactcaccctcacattaggtttcacatgaataaatttgtaaaagtttgtatttgtgaaaacgtagagtcttgttacagaacattacgacagaaaggagaaatctcagatgtcaatggcggataacatcaaaaacaaaattaaaaagaaaaaagatagctcaacaagtattgaagatattctagatgtgtttaacgaagccacgtctaaatcagttaagctgcacgtgcaaaaaatgctcagtggagagattgctgtagatagtgtatctgacttacataggttattttcaatctggaaagagattaacgagattgatggaatgattgaaggcggaggcggtcaagctgcactacctgagatcaatatgaagcaggataaagtattccaagatcaaatagaaagcgggaagatttcaactaatgaagaagggcagctagatgtcatggacatggatgaaggtgaaatgtccgagcttattagacaaatggatattgcccagaatagaattaacgaaggtgaattttaatgctaacgaacattgatggaaaattagtagcaaatatagctaaacaaacatttgggcgaaccaagcttacaaaagaggagcttgcttatgtcttgacaatgattaacccctcttcttatatccttaaacatcacagtgtaaaaaaccacccgatcaccttccacgttagtggacatgactcaacaagggctcaggcacaccgtccgtggcaggtggatattgtcaatgaccagcacccggataaagcggtaatcaaatcccggcaactaggcctatcggaaattggtattgcagagatgattcactttgcagatttacatagctacgctggcgttaaatgtctgtatacgttccctaagtaatttggggctctacaaggtgacctgtagagaaaaaccttgctaattgcgggaacaccctaaagccttaactaccaacctatcgtagcgatacagataggggctgagctaatcactcaggtaaggtaaaaaggttaaggatgtaacaatgggctatccgcagccaagcctctcaagtagaggaaggttcaacgactaaacttccaggtagctatacaaatgggtatagtgagaactggataagaaatccctttctatatcacttaaagttatttatagagatatattataaaataagaaaggagggttagatatggttagaaggaaaacgcatgaagagtttgttaaagaagtatatgacttagttggagatgaatatagtgtattaggtcattatactagaagtagtgaaaaattagaaatacagcataacatatgtggacataaatggtttataactcctaacaatttccttagggggaaaagatgtccaaaatgtgcaaagtataaaactactgaaatattccgtaaggaggttgcggaagtatctaatgatagatgggaagtattaggagaatacgtaagttgtgatactcctataaaagtaagatgtaaaacacacaaccacacttttattaacatcccaagtaacatcctcagaagaaaagtgtgtaaatactgtaacgcagaatatctcagtaaggtacaaagaaaatctgaagaagtatttaagaaagagctagaaaaaagacacaacggtaaaataattaatttagacaaatatgttaatacacatactaagatagggtttaagtgtttggaatgtaataccgtttttgaagcggaaccaaacgcaatcttgcgacttagtggttgccctacttgtgcagagtctaaaggagaagccataattcgagattacttaaacaaaaataaaataccgtttgaggctcagaaaacattttcagattgtaaaagagacaggttattaccctttgatttttatataccttctcataatactctaatagaatacgatggagaacaacatttccaacctatagagttttttggaggagaaaatgcttttaaagatcagcaggaaagagacgtaataaaaaatgaatatgcaaaatcaaagggtataaatcttgtcagaataccttactgggctacaaaagaacaaataacaaggatgttaaataaacattttaagtgatttagaaaagggaagtaatgcaaggaggctcacaccaaaacgtgagtctatgatatagtctactccgactgcctagagcagtgttaaagtgtctcgaaagagacggtagaaaggaccaaccgtcagatggaagagtttgtagctactcgactaaacccgcttttagagacagggtactactctactattgtagacaagaatgcagactcattgaaaaagaaaaaaatcagaaatagcttcttaatcttccgttcatcttctaaaggcgctgcggtagagggtgtcgatatcgactacctttctctcgatgagtacgaccgtgtaggagcttctgcggagatttcagcaatggagtccatgtcttcatctcagttcggtgttcttagacgatggagtacccctacgttaacttgtggggcattatagggcgacctataatgaaaaccttgctaaacgggctagtcgaataacttaaaagaatagactggtaagaaaccctgtagccttgaagaaggtagtgggaatcccgtgctaaatcagtctgagaagactgtaaatgcctagagactaagcttccgggtagctatataaatggatatagcgagaaccggataataggtctgtagcctctcgatctacctactgtatcaaactatggtataatataagtatcatatagttggaggtagattgtatggctaaaaaagtaactacagaggatataaagaaacgactttatgataaagtcggagatgaatatgaactcgtttctgagtataaaggtataagagaaaaggtgaatcttttacataaggtttgcggaggattatacagtgtagctccaagacacttcttctatagcgactcaagatgtaagtgtcaaatgaacgctaaacagccggaagtatttgctaaagagtttggagaactagcaaaaggagaatacactcagttagagccttataagaggaaggatgtaaaaatagcagtaaggcacgaagagtgcggtactgtgtataaggtgactcctcacgcattccttaatggtagaagatgtcctgattgttacggtaacaagagaaaaactacaaaagagtttagtactgaggtagatgaactctcagacggtgaatacactctcatgacagaatataaaaataacagaacacacgttaatatcaagcatatagagtgtgggaaagagtattccgttatcccaaaagatttcttacgaggaaatagatgtccatactgtaagcagtctaaaggagaaaagctagtccaaagaatactagataaagccggagttgaatatgagattcagaaagtttatgaagatttaaaatctaactaccgaagtttaccttttgatttttatttaccggaacacaatcttcttatagagtacgacggcatacagcactttgaagaagttcaattctttggtggggcaaccaaactagaatcccaaaagagaagagacgctttgaagaacgaatatgctaaacgaaactctattaatttactaagagtaccttattactactcagaaaaagagatagaagaaactatcctcagttatttacagaccgtaatgcaagggagctcacaccaaaacgtgagttcgtgatatagtccattccgactgctatgagcagtgttaaagtatagcgaaagctacggtagaaaagacagtaccagattttggcatacatgcactctttaaccagtctgacaagagagtttacatgcacaagtgcgatagctgcggaaagcacaacaaacttgattacgaagagaatattgagtgtctggacgagagtggcgtagacgtaatggctaagaccgttaaagacggtacattccgattcatttgtaaatactgcggaaagcctttggatcgttggtacaacggggaatgggtcgcagaacaccctgaccgcacagcagatggaggaggaacccgtggttacctcattactcaaatgaacgctgtatggattagtgcggacgaacttaaacgtaaagaacttaaagccaagtctaagcagcacttttacaactacgttttaggtcacccataccaagacgtagcgctagccgttcaagacaaagacattttagataacatccgtgaagacttaccagagcctctgatgaaccgaggaaactatagatttatttctgtcggtattgactggggtaaccgccactggattacaattcgaggattcagagataatggcagaattgatcttctccgtattttctctgttgaaagggcaagaggcgtagcaaacatcgaagctgatttagaaaatattatcaaccagcttatcccttacagcccggacatcatttgtgctgatattggagacagtggtaactacgttgataagctcattcagtacttcggagcaggtaaagtatacggcgtaaaagtaaaccctaacccacgatctacaggacagattcagcctaaatgggcggacacgcaatcaatggttaccattgacaagctaacacagaataaaaaacacatctcagatatgaaaatgggtagacttggtttctatgcaccggacaaagagctcaaccagtatatgatccactggaggaacgtagttattcgggatgaagaagatgagaagacaggagaagtataccagatcattacaaacaaaggtgatgaccactatgcccaatcatccgtatactcaatggtcggtatggaacatgtactagaaccgtacattactggaactcaagaaaatgcctttaactacacaactgtccaaagttttgttcctcagtctacagatatttttagtcgaggttattaattccataaaattgattaagagaggatttcttcctctcttttttaatggaatgttacagtgttgtgttataataagaacaaggaggttataccatgaggaagaataaatatggactatccaaagcaggtgtagatgagcttatggatcgcctttctaatattgcaaatgacattaaaaaagagagtatagaaggtctattagaagcgcagatcacatccccttttgtcaggtccttgactaaagtaaaaggaatggatgacgtgattgaacggaatgatcagttaaccaagtcatttcgaggtcttttagacatgtatggttttgagactatgtacgacatgtatgtttacgctaaatcttgtgattcatatcctgaagaggttctcaaagctaaagactatagcaaactagtacctgttaagcggaagatcgtacgtaacggtaaggagactgaagttacagtatatgagaacccgaacaaggataaagatgagaaggaagaccaagataacaccgaatcatcttctagaggcactcctaaagtgcgtagaaggcacgctagagagcttaaaagagatatgaagggcgaagataagtccttaaatccaaagcacgtagcagagcttaaaatggcagataaaaagatgagcagaggtaataaaccttttcaagaaacttcggagtattacctagtccttcgagatgaagatggagatattcaaggtattgttggatactcaacggaaggtcaatttttaaagatggatttctttagaagctccggagaagtctcaggtatagctgcaagaggttttactgagcttgttaaactggcgctaaagaagaaaaaaggtgttaaagtagatgaccagccagagggtaggcaggtatttgtaaaatttaaaatgaaacaagaaggacaaacttggagtatttcttataaagacttgcaatcgtcttttggggacttctctaaatacgaggaataaagcaatgtatgttataatggttatagtaattgctttatacacccttatcatatctttagggtttatatctgctgctaccgaaaataaaaaagataaatcttacataaaagacgttatgcacattatccatgagattaaggaaatcatacataaggaggaataagttatgaaagagaaacatgaagaaggagtatacgaaattacagactgtactagtgatgtagtaagcaagcatgaagaaggtgaagaagaggaaatcaaagatgtaacaaccccacctacgtttgatgaacgagtaaacagtgtattgtggtattataagttttctatgagtaaaaagcggaactcgggtaaaccatcaacttcagttagagggttatatgacgcccctaccttaaaggaagtagtgacagcccaaccaactgaggaagattatgagtatgctactatccttttagctgctttagttagagttacatacaacaattacaaatttgccctgtataagtctccagacgaaacagaacgggaaaactttttacggattgactgtccatacgaagagcataaatggcttcacgacaaaatttttaagcaaactattaaaaaaggactcgatatgaaaatccttcaggagaaatttgcagatgcagctattgcgggagatattctagaactaggggaaggtattacaatccttaaacatgattctgaaggaagattgatgacatctgtatcacctattaactcaggtctagagggttccgagattacatttatctttagttttgttcagacagaaaactatgaatcttggaagaagaatcattttaaagaagaagtagaaggagagagcggcgatgaatgagaggccacctcttcttcaatctctaagagatgacttcgttcgttttcagagtagaaacactgttggagggatgcgtacagaacatagtattttcatcccttcagaactattaaaggataaagcggaagaaacagatcaatttattagagcagctagagagattaacatgcgccaagattggagttgcaaagttacagcagagcctataactgtaagaggcattaagggtatagagtttgtatttgagattaaaccagatacagacttcgtctcaatcattgaggcactagatactaaattaaatatagattaacctctatattaagatcgtaaaaaattataacggaggtaggtacacatggtaaaaatcagaaaagacctcgtatcttctagcgtcattaaaaacgcatcttacggttacggaaaccctaagagccacatcgtgattcatgagactgccaatcaaaaacccggggcagatgcagcagcgcacgctaggttacaaaaaggaggtaactcaagagccgcttcatggcactacactgtggatgacaaagagatcgtgcagtcatttccggatgatgtaaagtgctggcatagtgggagtgcttataactctaagtctattggaatcgaaatttgtgtaaactctgatggtaactttaaaaaagccgttcagaatgcagcagaactaactaaatacttaatgaagaaatatggcatcccagttaaaaatgttattacacacaatgtttgtacaggtaaagactgccctcatttcttgagaagcggttccaaaggtattacatggaacgggtttttaaatatgctagatggaaaagtatcagttaaagagccatctaaaagtactagctccgcccctaaaaaatctgctggaagccctgacttcaatacgaatagcgttgtggatttcttaaactccgtaggtgaggactctagttttgctaaccgtaaaaaacttgcggataagtatggtattaaaggttatgaaggaacagcctctcagaatacagcgttgcttgacaagttaaaagcagcttataagaaacctgccaacaataaacccgctgcgtctaaaccaaaaggaaatcaaaaaacaaacagtattgtcgagtacctaaactccattggagtagattctagttttgctaatcgtgaaaagctagcaaaacaatacggcattaaaggttacaaaggtacggcagaacagaaccttgagttattagaaaaaatgagaaaaggttcagctccaaaagcatctaagcctaaaggagatcaaaaaacaggtagccttgtagattatcttaaatctatcggagagccgtccgacttcaatagtcgtgctaaattggcatctaagcatggtattaagaactacaaaggtacagcagaccagaatacagctctccttaaaaaggttagaggacattaatgtgaaagagacttgcattggcaagtctctttttttttattgacattgtgtaacacctagtgtatacttgtaataatttatactatcctttatacaccttagaatctcaatatgtagtataatagaggtaagggagaaacacttattctgagacaaaggagtaacatctatatgacacaaaaagaaccgctagacctgagtaaactaactaagaacgattttcccatgatcaaaaagttagaccgtgagcaggaagacatggtaaataaactgtttaagtcaaaacgtgttattgttgatgcagtagcaggctccggaaaaacaactgtccttactcaagcaatgaaagtgttaaaggacaaaggaatcatcaaccagatttattatgtggtattccccgttcaagaacagtcattaggatttcttccgggaggagttccagaaaagattagagagtacgctgtaccgttctttcaggcgttagtaaccgcaggagagaatcctcatgtgttggaccttgatgttatgtgtgatgagtttcaccctggagactataaagttgttccccatacgttcctacgtggaagaacaatagacaacgcaggtgtcattatagatgaagtccaaaatggaacagtagatgagatcagaaagactttaacccgtattactgataactgttatgtaggtattgctggtcacaatggtcaaattgacattaacaaagaagcctctggattttcaagatacatacaccattttaagcaaggtaaagaaagagggttctttacagaggtggagttcgctgagttaactaatgattaccgaggaaagttttcaagttttgcagatcaaatataatcaggaggattaaaaatgtcagatttaactgaaaagaatgcaaagatgtacaaatattataacttagttgaggcagcatatagggattttagtaaaacacaagggtgcgactataatgaccccaaactttactcaatgtctcttcatcttttagaaagagttaaacagctcgtcaatactatagaggatttagacgataacctagatgtccaaaacacagatttacctaaaattgaagatgttgtgggagaggatcgctctctacatgactatatgcaagctcgaatagagtacgcacatagaaaagataaagaatctttagaaaagttacgagatgcagagtttaatcttagtgagtcattaaaaagtaaataaaaaaagatagaaaagaaacaatccagcacattgattgtttctttttcatatgctacaataaagttatacgaattatatagaggaggatatagaacaatgacaaaggttttcttcgactttgagttcaccggactacatcaaaatacaacaccgattagcttagggatggtttcagacaagaaggagctatactgtgagtttacagactacgacaagagccaagtagatgagtggatagacaaacaggtgatccaaaacttgatgcttaaagacgtggcggaagatgaacgttttataaaagagataggcagtatgactgttgttagaggggatagggaatttgttaagaaggcggttacagagtggcttagtcaatataaacacggtgtcgaattatggggagacactttaatttatgatggtgtgttatttaatgagctgttcggcggggctttttttattccggataacgtttattatatttattttgacattgcaactttattcaagttacacggtattgatccagacattagtagagaggcgtttattgaccaccctgtatctggtgcaaagcataacgctctatatgatgctaaggttactcgtgcctgctacgacaagctttcaagaaacagagaagaatatcccgttgttttttaaaaaaattttcataaaaacgttgacaatatgttatagtcagcatacactatgaatataagacaaggagaaaataaatgatatcaacctttttctggttttcgacaactgtcggagtgttcgcagcaggttgtatttgtatcttactctgtataagatgcttttatgacttctatttataccgattactccgagactgtatttgggggtttatctttgtattagtcactgtatctgtgttctatgctcttattatgagtatatccaatttttcaaaatgtattccacttttatgagggggtaaattatggaacataaagcgagcttcacttcagtagtagggtcgcacaactataacttagtaacagacaaatctgatttagacaaattgatgtttgtttatcctaattttgaagacatgtataaaggaacgtttgtaaaagatgtaacaatctcaaaaggtgttgatattagtgttcatgatgtaaggaaattaccagagtattttttaaagagtagtcctaatttcttagaaattcttttttcagtaaggactgtggtggaagatgagctgtttaatgaattgagaaaagagcgggacaacattgttaaaatgaatctaccttctttttatgaagcatgtagggggatgttcacacagcagcttaaaaaagctcagaaagttcattcggagcgctataagtatgcaaatgaggacaatgtagatgtagttgtaggtaaaagcatcgcatccgctctacgtatttataacttacttactactttccattcacaaggattttctaactaccaagattcgttatggtatgaagtcggaacagtggaccacggcattattgcaagtttaaaaacaggtgaacttaaaagtcgatatgaggagtttctagaagtactggaagttaacgccgacatcattacgacactaaaaaaagattatcgggataatgtcattgactatgaaataaaagagtatgtagacgaagttgtccagaaatatgttaaaaacaaactaaaagcagaattaaggtgggttactctatgacacatgcagatttagaatatttgaacttagttaagaaaatagttaaggaaggacataaaaaagaagacagaacaggaacaggtactattagtctttttggtcctcaaatggaatttgacctgtcaaaagggttccctcttttgacaacaaaaaagttaccttttcgaattatcgctgaagagttactatggtttattaagggtgacacagatttaaaaacactactcgacaagaatattcatatctggacaccggacgcttacaggttttacagagaatccggaggtaccctatcatatgaagtatttgtagagaaagcaaaagaggacggtttcgatttagggcctatctacggagcacagtgggggagatggggagataaaaacattgaccagttagggtacgttattgaggaaattaagaataatcctgattctcgtagaatgttggtatctacttggaaccctacagatttatctaaaatggctctaccaccctgccatactatgtttcagttttatgtttctagtggggagcttagttgtaaattgtatcagcgcagtggggacgcctttttaggaatacccttcaacatcgctagctatgctttacttacacatattattgctaaaatgacaggtctcaaggtaggtaagttcattcacactttaggagacgcacacctgtattctaatcatttagactcagcgttcgaacagctaaaaagggaacctagagaactacctaagttagaggtaaaaacgattcatgaggacatccgagactatacaattgatgattttgaacttatcgggtatgaccctcatccagttattaaaggaaaattaagtgttggattaaaagatggaggagaaaaataatgagagaaattaaagttgcattgtgcggtggagtacgagtaggaaaagatacagcagcggagtactttggagagtatttgaatatggttacctttgcgttcggggatgagcttaaaaaggagttccacgagacgtacccacatatcccgaaagaccctaaaccagtcagaggatatcaatttttcggtgatttaatgcggtatgttcacggagaaaactactgggtcgataaatgctttaacaaaattgaaaaacaaagaagtatggctaaaaactatagccagacgtgggtttctgaagaaaacgggatcgccccttatgaaggaccgtcatttaatcctttaataactgatgtaagattaccagcagaagctaagcgttgcaaagaggaagggtattttgtagtacgcatcgtttcccctctagaacagagaaaagagagaatgaggaaagaaggggacctattcaatgacgatgtctttacatctgaagcagaaaagtatatcgacagtcttgacgtagactatgaaattgttaatgatggcacactggaagatttcaaagcaaagctgtccgtttctgtggaaaaaataattggatactcacgggtactttaagattagtaggcttcataaaggagcctatttttataaaatataggaaagttattgacatgttacaggctatgtcatatactagtatcaaagaaatacacaggaagtgaagtagattgcatatatcattaatcgcagccatcggtaaaaacaacgagattggtttaggtaataagctgctatgggacatcaaggaagatatgaactggtttaggaaacacaccaaaaataaggtggtggtgatgggaagaaaaacttatgagagcatcggtaagcctttaaaaggtcgagttaacgttgtacttacaagaaattcagactataaccctcacccagatgtattagttcgtaaggatatatccgaaataacttttgagtttaggaacgagttagaagttatggttataggcggagagacgatttataaacagtttatgccgtttgctaacagattatacatcacacatgtaaatcatgaatttaaagcagattcgttctttcccgattttgacacagaagatgtgtggacacggtatttttaccaagaaggttctgaaaattcagagtataagtacagttttaatgtgtataaacggaagctaaatatagaagggatgaggaaaaatgtatgtacatgatgtttgggttaactggttttatggttcttttaaatcttttgagattccagaattccatgaatggtggtctagtgatgatgtagagattatcgatacaatgcctgttgtttacgtgacaaaagctacactcgattccgttcaagatagtatgtcggagttgcctgtagaagttttggacctcgttagaaaacgagcggttaaaagaggtaaaggcggagagaaagaaggaattgagtatgcaatgatctttacagacggtaatcgttcattagcagttgacacagaaggtacggcaatccctcagagaaaaagcaagctaattcctcgtcaagataagcttcttactgagatgattaaaaataaacaggctgatctagagccattcagttgggactactcaaccgaaagagttgaaccagactacattctatcagtaagtgacagaattattaatgttaggcaggagtcaatgacaggtctcacgagacgagaaaaagaattaaagagaaatttgtttgaatatttgtttgagctaagcatctctgattctgatattgaagtattctactggtacactgagctatttccggatagaaaagatgtcagtaagagccgaaaagaaatggtaactgaaatgtttgaggaactggagctaggctggagtgaaaagcatgaaaaattcggggagtctttctctagaagtagcccatattactatgatgcttggagagagcttagtaaagtaaacaaagattttgtaatcagtcttgaggaggaataaaagtaatggaagtaaataataactacacaacaatggccgtccaactatcagatgtcggaaccattacagaactatccagtattattagtaatagagtggtggcagatgtttcattagagactataggggatgtaggtaaggaacatattgcactcggtattcattttgaagacggtaggtatattagggtatggcaagagtctccaacagagtggagtgtaaaattttcagcaggacctgaccctgtgtagacagtaatcaaggatgcggtattgttatatatcgtaatacaaagatggagtggtcctgcgtagtgaggttaacctgagattaaattagtcttaaattatttctgtatactagaagtttatctttccccttttatattattagtaggaaatacctcttatgggtatattttccgaaaaaacgttaaaggggagattttattgactaatgggtggatgtacttcattgattttgagcagttcggtatcaaggatgacgggacagatgcaacatcaacaactaatgggttcgtagcagcgtttaaaagggccgtagaactcggtcactctgctgtatatgtaccagaaggtacttacttaattgacgctgtaggcgttggtgactacctcccagagtacggaggaggtcttcagttcccgtccaacattgaagttatcctacatgagaaagccctttttaaagtccaaccgaatgactctaccgggtacgcttgttttaacttagaaggcgtagaaaatgtaacaatccgaggcggacatattgtaggtgatcgtcatgaacacaactacagacaagacgttaacgagaacagacgtactcacgaatggggattcggtatccaagttcgtggaagtaaaaatgttacaatcgaagatgtaacaattgaagactgcaccggagataacatctgggtaacatctaaaggtatgatgaactggccgggagtgtacattccatctgaaagcgtaacaatcaggaaatgtagaacatttagaggaagacgaaataacattgctgccggagcaagcgtaggtctacttatcgatgactgcgatattattgaagcaggcggggacgaaattggaccgcagctaggtattgaccttgaaggctacgcagacaatagcatcaagtaccagcatccttatgagataaatgtgattaactgccgatttaaagacaacggaagaggttctatgaacatcaacgtgtccggtaaagttaatgctatcggtaacttctgcgatgattacattggttacgggttttcaactgacgtaactattagtaacaatgttatcacaaacgaaacaggggttcacaaaaaattcgggatagactctattcgtaagtctacttcggaaacagctaacagagtagttgttactggcaatgtaattcgtggatttcaaacgggtatcgctgctagaggtaaaacggttacggtaagcaacaacatcctagaagatattagttctattggaatctacccttatctatgcgatcaagcagtagtatcgagtaatatcatagacagcgactgtctacacatttgggttagagaatcgaagggtataaaagttagcgacaataaaggtattggcgcagctaacaatgtgcctataaaagtagacgcctctaaagacgtgttactgagcgataatgaagtttctggaaaaggtggagttcgagtaagtcgctcaacaaatgtgagaattgtcgataatgacattgatctgatcggctcagattatggcatctactttgataaacagtctgaagtacatcttagagataaccttgttaaaaacgccgctttcactgcaatcatgggttatgcagatcagtacagcagctacataaaaggaaacattattcaagattgtaagtacatgatcgctatgcacattgacggtggatcaaaacatatgattaaagacaatgatattacattccgcagagggtctaatgcaggctacggtgtctatttaatcggagcaaatgactctcgtttacataataatgacattagagtaatggatgggtttggccttatcaactctttctacacgatccagtctacgaacactaagttgataggaaatacatatgatacaggtgagatgaaaacaaacgatactgacttcttgcgatacaacgagaagctacctaagtaataaatgagggcggttctccgcccttaaaatatacaacaataaagtggaggttttttaattggcagacgtttaccaaaactatgaagaattgagagcatcggaaccagcaggcgagtcttaccggatcgaggcagctaaaaacagtgaaagattgatatttgttgccccgcacgcaggaggaattgaagtagcaacttcagaactgacaaagcagctttctgattcaactaaagagagctactacttgtttgaaggtctcttatctagcggaaatggaagactccatgtaaccagcacaaacttcgatgagccgtcatgtttagggttaatgtctacacaccctgatgcactttctctccacggatacgcagacagcgcagttaagaatacaatcgttggaggattgaacacagagctccgtaatcttgtagtagaaaagcttcagagtttcggtttctccgcagaagtagcttcagatagatttacagctacagacccacgcaacattgttaaccgctgcacgtcaggtaaaggcgttcagttggagctaagtacattgcagcgtaaatctttctttgagaatggagactggtctaaaggtaaccgggaaaatacgacatcagagttcttccagtatgttcaggcagtcaaagaagcaattgatgtctactacggttctatgtaataatgaagacaacctaaaaaggttgtctttttttttgtaaaaaggctgtacatattgtaacacatggtgtatactgtgaatataatacaacataagttacagaggtgaataaaaaaaaaggagatgttttaaatggagaataagtgtgtattgtgtgatgtttgtgacggtgtttgtggaagcaagtatagtagaatacctgctgaggttactttagctaaaaaatgcgttgaacttgattttaatgtatgtagtaagtgtacggataaaatagatgagagattatctgaagagtataaaggaacacgaggaatggaatttttaaaagaaatgacaagtttgtatatagaaggcggccttccgattaacaaagtttcaaaggaggattaggatgaaaaagaccttgcaagatatagagaactggagaaaagttattaatgcaattaaacaagataatagtgaagaagatgcttttaaattagacgatttaaagtgtaaagaagcagaagataaacccaagcaacgatttgacaatcatgtattaggctccctctatcaagaggagagcattttgagacacgaaagttttattacgatagacagttcttgtattaaaaaagataaccttgcaaaatttcaaatagaaatatagttgaatcagctgtaaaaaaggaggtcgaataatggacgaaaaagaaaaaaaaaccagaagtaagaccgatccaaccctctgttatacagttttaaacagatgaagaggaagaagagttttataggtggttgcactcggatactccagattctgaaggcgctaagcgtgtgaagcgtgctagaaagctatataaggagcacaagcaggctcagaggagagataaaggtgagtaaagttcgtcagttatatgataatacgctgcaagaactagaggatgctaaaagaagaaatgatgacgaagaaatcatatttttacaaggaagattgtctgctttaaaagatgttatggatgtagaggacatggaagttagggataacaggtattggactaaagaagacaaagagagatttttagtaaagtctttgttaaatgaggcaaataatctcatatcttatcttcgtaatcctcatacgtatgcttactatgatctagagggcatgaagagaataagcagtaaattaaagaatataaagagtgctcttaaagaatatgatcatgcagctattaggttgttatcaaaggagatcgaagacctagacagaaaaataaaagacagggaggtagtgaagtgaagaactgtacaaaacattttaatgaacgttgggcggaaaggatcgtaggtttaaaaacagagaaagagatcaaagattatgtagcaaaaaataaagatcaaattcaagagcacgctaataaaacatttgagtatgcttcctttatttacaaagggcagttatacaataatatcactagaaactactacatcaaagacgatattatttttgttactaataccacggatgatgcctttattactacatacaaagtagatatgggttttccgggtgagctaaattctacagtaagaaagggtcttattgaagagattgaacgtcttaggaaagaacagaacgaggttgagttggaagtcttatctgaaattgaaagtaaagagaatgagattgatggattagaagatcaaattaaaattatggaagagcaattagtcaatctcaagaagcagagggaatttttgaaaacagaggtcaatcttattaaaaataagtccgctaatgtaggtctagagcttaaaaaatatacgttgatgctgataaattcaaaagaattcaaagaagatttgctaagtataaaataaggaggtagtgtaatggaaactttaagactttcagaacttcctgattatgcagaactagcttgggaagacgattacgaggaagaggaggagtaggtggtgcctaggaataaagataaaattattgaagaaattgaattaatacttgaaaatgtagaagtaattaagtttaaaagagatatgttgaaaacctttagtattggaggcgttaagcgagatattaccttagatggtacgggattggaagctgaagaggtgtttatccgtattgattctaaagccgatacctatgaagcttatcaaacagacatacatcttgtaagagaagacttagaatgcctgcctgctagaaagccgtttgaaagactagtgcaatattctgatatcgttaatattgaaattaagtattctgacggttcatctgaagaaatttcagtaaactgggattactgcacctctgacgatgtaaattcgtaccagacaaaccatattagtaggtcaagtggagacttatatatttgtattagtgataacaagtctgttgaagacgctttttacttagacattgacgattatttacacagtgtgaaaggagataattaatatgagatgtaataatcagcattgctactggaatgcttttggctcttgttgtcacgaagaagaggaagcgttcgagaaagcaacacccaatgaactagattgtccttcgtctttaagaggtgactgggaaaagcagtttaggtatctttttgaagagtgcgtagatttgcttaaccacagatcatataaggaactggtggaagttaagaaatttattgaaagtcagcgtgaaaatagttttaatgaagaatctcgtaataagtctgtaagtgagtgggaggtagctgatcatgagggttgataatgtcgaagttagaaaagtagaatatgaaaaattagttcatttggagattgagcatccagtagataattctatcgatactgttgaaattggtctatgttctgtgagggctagtgacgatattcgtataaaatacgactttgaccgtggtgggtgggtaatatatcaacctaaagggtactttacggaagttagtagaagttcaggccgcattgtagaggagtatcacgaagaatggattgaatctgcattctgtccatcttggaaaaaccaaccggaagataagtgagactttctcggtttagaggggaaggaataaaaaaaaatgaccattgtcgtggagaaggtacagtatgaaagtatttgatcatataaagattctttacgggaagtgcagcggctgtcttacgatttagtagactatgatgagatatacttggcttatgatgagtattatgagtgctactatgtaactgatgatgttgataagctttgtgaggagatacaccggaagtggacggatgccgggtgcgataacgatccagaaagtgaagctgatagtattgaggtatggcagtacttacctgcaaaacgtaagcaagattaccttagtatatataaaaagtgtaagccatcactactgaacactaatgtacctttaattagggagaaggttaaaataggttgtgagtattatgtagatttcattataacccgataagaaggatactaaatccttctttttttttgcataaaactatagacaatggaataccttgtatgttatactctggttacagactaattgaggaggtgcctaactttcagataggaacgtgtgaaaggtgttagaataaagatgtattatctttgtacaagggatggtatttatgtggaggttgcacagataaattaattaagatggaggagaataataaatgaggtacgaactagaagttgaagagacaatgcgatttcttgaaagagctactgttgaaaagccggaaaacatgagtgatgaagaggcggaagctattattagcaaggttgaaaaaagatgtcaaagattgatgtactctactggagacatggttaggattctagaagaggagtacgggtttaatcgcgtagatgtttcattatcttttccggaagaaccatactcgtcggatattgagattgtacagattgaaaaatatcaatatgggttctgtccacattgcagaaccttccatttgaagagaggtatttaaaatggcaaaagttaaagtttttgtagaagagaacatccgatactggagtgagattattgtagacgttccggccggaggacatgaacgttgacgtattcgaagacattctagacactgcataacctgataagaaggatattaaatccttcttttttttttgcataaaactatagacaatggaatacactgtatgttatactctggttacagactaattgaggaggtcagtaagtaatgaaattcacaccgttcgataaacgaatgaaagaatatgaaaatgcttatagaatgaagctaccaaaacgtatgcctgttatcattagaattgatggtaaagcatttcacacgtatactaaaggaatgacgaaaccatttgatggttacttaacacacgcaatgtgggagacgtgtaagtaccttgctaagaacattatgggatgtaagatggcgtacactcaatcggatgaaatcaatttgcttcttactaactacgaaaaagtaaccacagaatcatggtttaataacaatattcaaaagatagtttctgtatcagcttcgttagctacagcaaagtttaatgaggttatgcgtgaggagtcccctacaacaggagttagtaataagttagctttattcgattctagagtgtgggtgctgcctaaagaagaagtgattaactattttatatggagacagcaggatgcgacaaagaacagtattcaaatggttgcacaagcagaattttctcatgatcagctacagggccttaatagcggacaattacaggataagttgtttttagaaagaggtattaattggaacgatctccctacatggcagaaacgtggttcttgtattaagaaagttaactttgaaagaaatggctctacaagaagtgcatgggatgtagaccttgaaacgcccatattttcacaggatagaaactatatcgagcgttatgtgcattaggtagagcatgtaaggctaaggaggagtatagctatgggagacattgtagattttaaacaaaaacaaacacctaacctgtatatagtagacgactttaaagttattttagctttttcagaagatgaagcttctaaattctacaaagaggaagagatgcttgactacaatccatccattgtcttgttagacgataacaaagagctcaatgttattaagtcgggcaaggttgaagtgatactttggaaaaggggacctaaattccctgagcaactatcttttaatcttacagttagggagtttattagtaaggatttgaagaggtttaaagtacctagtagtatagatattttagaagataagggagcagaagtgcctaaacgataaaggagaggtaggtatgaaatacattgaatttaatgttaagattaaagttgaagggtcagaagggctcaatgatttagtagataaacatggagaagacgatgtactaatcaaagcagaggagtctgttaaagagtttattgagagtatgcatgatgcttctgttaccgatattaaagcatcttttaaggaggggtaatatgccaaagtatagaaaaaatcctgttgtgatagaagccgttcaatacgatggaacaaacgaaaaggaaatagagttatttgtgaataagacaataggcgtgtcggggcttactttagattacgatcctgaagtaaacggctacttcatccgaacccttgaaggccgaatgactgtttctgaaggtgactatgtcataaaaggcgtagagggtgaattttatccatgcaagccggatatttttgaaaagacgtatacaaaagtggaggatgagtgatgatgaaagcgttagttacagaagagcaggcaaaagcgattgagtttttaaggggagcatatacagatggagaaataatgacaatgtatgtagaggatactctaggctatatcgagatgcggcatggccgggatgtaggttgcttgtacaacttagatgcactggggttagccacagcactaatcaacggatatgaagtcgaaaagacgccggaggagaagattaaagagtattacgaagaggcgctaaaatgtcacagagaaagtaaatatgaatgggatgttgaaagtatgcaataccattctgggaggatagatggggtaaggaaaacgcttactattcttggagttgatattgaaggggtgaatgtataatgacaaaagacgaattaaataaaatccgtaaacgttgggaagaggcaacaggagagtcatgggtgtacgttgagactacagaaggacggtatgtactcaatgaagacagtgacattatttgcggtgaatttgagagagaacaagacgctagatttattgcttgcgcttggcggagcatcccaaagcttcttgattatattgaagagttggaatctacgattacgaaaatgtgtcctatcgccgacttttcccttgtagactctcttctatcagaaaaagaacttatgctatccgaaatgaaagagatgaaggacaccattaaggaattgcggagggataaataaatgaaaagaaaacagtatgtaaagattaagaaagtaaacgggtctaggtactggtacacagataagattggtgaaattttcaaagtatcacgggaatacaactccgactatgaggtatataacggaaatattcatgcttgtttagtagctaaagaagacgcagaactcatcgtcacagaaaagcgtccggctgaggttggcgagcgtgtcttgattacggaaaaaccagtccgtaaagactacgaaatttatgaacctgtgacagtagacaacgttaatatttacggtgttgaatcgtacaagaacggtcgtccaatattcttaaaccattacgaatacgaagtcatcgtcaataacgaagttaaaaacgaggaggcggacgaaatggaaaataaactactaatcgaaaatgctaaaacagtttttgaaaagaagggcgataaatacttcggctataaatctcgtctaggcgatattgttataggtggaaattattcttatgcattcatagttcattacgcaaaaacaaatgaggatgtcgttattattccgggcgatgttaatgtagttacaacaccagtttgcacaacagaagaagaacgtatatggaagccagaaaagagcgcacaagaacgccgggatgaaatcgttgagcgagcgaaggcggatattgaaaaccttaaatatcggacattctacggagaactacgatattcttaccacggcattgtttgtaacgtagagttcgttgttaataaagagaaacggactgttgtcgctctccttaaatcggtaggagagggtgcagtcaagtcaaaagggatcgccaaggccatgccggatgactgtttcaatgaacatatcggaaaggctatcgctctccatcgtgcacttgggctcgaagtacctgacgaatatcttaacgccccgcagccgactgaggttcgtgtgggggatgttgtcggtagtttcgaatttaatgaggtcgcggattattacggaaaaatcgtggatgtgagcgaggataaggttttttataaggatggaggattcgattatttacctacagtaacggaagggattgatgaatacggagaaaagtctttcttaaaaatcatcgacgacagccggacgggggtggaagaatgaacatcggacttgaaataaaacgacttttagacgaaggttatagggtgaaatctgaagcggcgggcagagtcggagaaataaccagtgtgtcaaaaaacgggcataatattcgttatatatttcgtggaggagataggcagtatattgggcttacgaccttcaatatcggagataaagttcgtatcgaaaaacgtgacgatcattatgcggtagtaaacgtgatcgagaactaacgaaagggggagcacgagtgacgtttcacagacgcctaaagacaacggtgtttaagaaatacagcggatatgattggacatacgacggtatgtattccgaaccgagagttaaaggcgctgacaagcggatgcgatcgaagcatgagcgcactatacgaaaacgaattgatcgtaaggaggtaagagaaaatgagcataacgaagatggaaactagagaaatatttgaccgtagcaagatcggtaagggagatgtaattgagtttaatgaatacgagttcaaattactacggatacctcccggatactatgatttaccgactaaaacagttggtgtagttaaaagagttttagaggactcaattgaagtgtatgcacgaagcataagaaaaggtattccagaagacgaatatgtaacaaaaatgaccgtgggagttggtcacgcagactctataaaaattctataccgtcatccggcaaacgaggattaatggaggaatagtcaagtgaaagtcaagggtatgcgtgtttttagctacatagggggagtgtattgtgctgcgatgacaatgttagcacttactcatatagatgtgactagcttcatgtggtgggcgttttatgctcctcatgcaacagccatagtaattctaggtattattaattttgaaactttactagacctcgctttcggtattacgaaaagtaaagagctacgttcaaggattgaagatgaagcggagaagacaatgaccgaatttaaaacgttaaaagttaacacagagtccggagaggaaatttattatgttgagcaagcagataataaggaggataactaagcgggaaaactcgtaatcgaatcaaggtcagaattagttctagatgaggatacgaagcagacattaaaagaattagatcagaaggggctgctagaggaactattaagacggtcagaagctattcttaaaaagaaacttaatgaagatttcttcgatccaaatgtaaattgggaaactacaacacgcatgtacacagtaaaggagggcgaggaccaatgaaatttaaagagttgagagaccgtattaatgagttgtgggataatgagatgattagtgatgaagctgaggtgtattttgaagataaactggcgggctatggaggtgctattgatgatgtagaatacatcgacatagataaagatgggaatttaatacttttgaacgctatatgtgacgaggaggggtatgtgtcagtatatatcggaaccaatagttaccgcaagtaccttaacggagaaataattcctgccttttctgtaaaggacgaacctgatcagattaatataatgatccctgaacaccatgtgttggacgtacgttatatggaagatcgtgaagtggtccggtgttatattaagcgccccttaacttaaagtatggtaccaaaaaaaaaagccctccctatataaacacggggaggggttctctctactagtttttcttatatagatagtgatactttgtattgccgaacgactctgaatctattgcctctccaatatactcggcccatgtttccttttcctcctgtttagttaaaccgagcaccctataaatgtcttcatcaccaacgaccattatcttgcccttctcaagtttaatggttagctgctccttatcctccttatcctccttatattcaagaccgtatcgttccgccacttgtttaaccattttattaagatcatctctattggtcattttttccagctcccttacacctttaaatttttgtcccgagattgctcacgtattcacatattgtttaagataccgattattttagaaaaattttaggcctccaaaatttctaccccgggtagagcttacataggggtaccttattctttatgaggatttttaatacggggaggggttgacaaccattccctcccgtggtataatggagaaaggcaggctcttcacctgctccgctccttaaatgaaatctgattgactgattccattcattttcatttgtctttccatgtcggataatcctgcaccgatctgctttgcttcttcaatactctctattacctctgctatatcacttttgatctcatctaggctgtagccgataaactgaatgtcttcctgcatcatatctcgttcgtcttctgtgtcgtagtctccattgtctagtgcatcctgcaggtctgctaacttgtcaaggtaatcctcctgaaggctctctaagtaatccaactctcttctgtattcttctagtgtcatgtttaaaccctcctgttatttgttatctttattatataccgttattgccttaaagtcaacatgttttttttaagaaaggagcggattttattccgcttcctcttctagccagtattcctctaagtgttcatatagtttgttcgctgtatcgtcaatgacaaaccataccatattgttaggcatatatttgtattcacagtcatcgaaaggatcatacccgatgtcatcaataatatcgtcaatgtattcaagaataagcgtcatataatctctgaacaattcagtagtgtcctcatgggagatagcttctggaacaattccgcttacacacccatgtgttgcaaggtcttttaagtaattaattgcgtcctcttcattgtcgtggtcttccatgttatctttaatgatttcaacagcccataattgcatttcattttcttctgcaatttcagtaattacattcattagtatatccactctggaaaggtcgctagttccattcattagtttttcaagttttgtcatgcttattctctcctttgatttgttaagttaagtatatcatgagaattgtcttaaagtcaacaagtttttcattttaattttaaaaatcttctttccttaaataagtaatgtactgcggtggaattggtttataagagcaaacttcatacccgcatgttttttcaacttcaaaattatccgggatattaacctttaatgtatgcaagtccccttcgtagtcttcaaactctcttcctagccatccatacaacgcatctgttaaatcatcaatagaggggaataaatacaccgcaggacgtgattcgattttttctgatctttggcctataagaggttttaaaccctctttcagtatgctgtctaaactctcgtcagttgtcacatggtataaaatcattttccacctccgttgtacccttttattaattctttaatttcatcataagtatttgtcaccttatgatgatctccctgtactgtagttatttcacacttaaccttcccgttattattcgtttctgttatgctttctatctcccttgggtttattgagagtctgcacgttttttccactagcgtatgctgagccataaaccgctcataaaccttggttagttcgataaacatgatatcctcctcctataaaagaagcggattttattccgcttcctccttgttctctaggtctgataaaagtgaagcggctgtttcttcaatgataagccaaactgccaccgtagggaacatagtatagtcactatcataatctaaattcttcatagccgactgaataacgtcatgaccaaattcctcgtttagttctgtgatgcgttctaggatgttctccatgttatccttaaaaaggttgttaatatcgtatgtgtaaattgcgccaccaacattacctgaaatacaaccgtgtgatgtaacatcttcaagataagacattctttcctctctgtcaagtccagtcatgttatcctcaagaatgtcaaccgcccactgaatgttattgtttgtcataataaaaccgctccctttgatttgttaagttaagtatatcatgagaattgtcttaaagtcaacaagtttttaaatttattttgtcgtgcttagttcctttaagataccttccactagttcatacacacgatctgagtatgttaagttatacaccgcatgaataacacttaaatcttcttttttaatcccgtattcaagatatttaatgtctgttaacacttctgcatcccatctacagctaaaatcagaaagacgtgataacaattcatctttaagttcctctgtaaatacgttacccattatagccactcctttaatttgttatctttattatatatccttatcgtcttaaagtcaacatcttttatgaattcaatacgcagaatctaatatccgtattcaatgcttctctgtgctgtgcacccttctatatgatatcgtacaggaagtccagcgtgtcacccgcattaaggctctttgtagcattgtcaatatatttgattgcccattcatagtagtgtggtgtcgttatagattccctcttatctgatttgaatgaagtgggcttccgttaatgtctctgcgtgatctaacatatgttttgctacagtttcaagtatatgacataccgcacccacttgaatgtgttcccatgctgataactcataatgtgtctgagcactgaaattatctgcaagtgcttttaaaatatcttccatgttatcattaaacagtttgaacgctgtacgtttaatgtctccccctagcagacctctttcctgagcaccatacattacaatgtcctgtaagtattcaatagtgctgtctacatccaaacctctagtagcattctctaagtaattaaccgcccattcgtaatgttttgtcattataaattcctccttttgttaatcttagtataccgcgcttattgtcttagtgtcaacatgtttttatgaattttttaatgcttcttctaacttgtctgccataatacccgctacagtttcaataacacagtaaaccgcttcttctttaaagtcattattgatcactggtataaccttttcataaggcatatctgctaatgccagtaagatgtcttggtaattgtctttgaatatctgataagtgaaggaaagaatgtctgtgttcagtcgctcccatccttttgctccgtagtgtgtgatctctcgtaaatatttgattgtttcatctgcgtttaagccccttgtcgcattgtctaaatgcctgatagcccattcataatagttaggtgtcactgtttaaccctccgtttggtttattaaatgttaagttaagtatatcaccgtgttgtcttagcgtcaaccctattttaaaaattttttcgacttttatccggtttattttaatttatttaagtttataaccacttatgatcagtttttaacgttttaaggccattatgagccgttttaacctttttgtatgtaaataccctcggaagtgattaggaatcggcagaagctaaaatatgaacgatgagggctattctatggtgaccgcccctgcgctccctgaccctctagatgcgataaataaagtctagcttgacaaaggttagaaaaaaatagccggggctgtcaaacggtttttggtttccatggttttaggttttcgattttcggttttttattgccttggtttaatggttttaatgctccatactaattagtctaatacatctagtagtttaagtagcggtgtacaaacaaaagaaaatatagtagcgaacacaccaaaagcaaagcacccttgtaaagtatagttaatgattgtcaagtccccaacgataagcgctataatagacataaataaggtaacggctaacggtataccaatccaactaaagatcataaagaacttaaagcactcccacactgtatatacctcctgtatattgtttatcatattatatattctaaatcctaaattctaatctttaatctttattcctcactcttatatcttataccctatatgtctttaacgcttcttcaatctgatctttaatatctgaatagctttctttcaccttataaacttcattattatacgttagtatctcgcatctaggtgtatacacttctgataactcagtcacactcttaatatctttaactcgtatcataagcagtctactatcgaattggccgacttctgttgttagttcaataaacattatttattccttctatgctaatccatctagtaacgggaaacatattagtgtaccgacaagacagaatacatataagaataagtttatcagtagtacaataatgattgcggctagtatagatgctcccatagtgtaagatataagtatacctaataaaatgaatggaataggtgtgccgattaagaatataatagatattagtttaatgacgtctgtcattgtttactcctcctatttttattttatttttaatgtttagtccagtatctctaaatctatccatatttttatcacagtcagtaagacagcacataacaccgcagatatgcataggcttaataatagtagcataaagagtgggccgtgtgttatttgctcccctccataggttttgaaaagtgtaatcactagaaaagcagacacagaacaattgatcgtgaatatagtatttgttactatataaatggtttttgtcgttttcactatctattcctcctgtatcttgtcttgttttccatactgtctatataggtgattaaatctttaattgttttctctttaacagtgtgagctaatgtctgagaaaattcgagtaaaatatcttctgtcagttctcctgcatctgcaaaacgccaaacatcattaacaaagtctgtaaccacatttgtaaagtctaatagttcttcgtctgtattctttacgatttcatattctcccttgttcagtcttacaccaccgcaacagtcgataatgacataatgagggtgtgcttcgtctactgtccataccgtgccaatgagtccgctgattgttgtgtcttgtttagttttttctgtctctagtattcttactttcattgtttattcctctcctttaatggtactagtcagttgtctaatgtatttgataagtttctttttgtcttcttctgaaatatcttcattttcggataggtttagggattcaagtccatcggctataagttctaatttaagccgttttgcatcgttgtcaagttgatatcctgctatgtctaactttaaccttgctatgtttgactttagccttttgttttcttctaatagtgcggatgtatctacgtcatctggttcaatatctacgctgttaacatagcctattaacgcatctagttctctttcaactcttcgtgtccatgattcaattattttagcatctgatgagcgtacacggaaaggaagatcgttaaacccttctagctgtagtaaaacacttcggatataattcaatgtttgaatgtattctagtctcttcaatgtttactcctcctttgtatgtatcgggttgccctatagacaacccttattcattatttattgatctttgtgataatgttctggccgtatttatttgttttataaaagaatgtgtaatactgtccctctttcaagtttttgtagtaccatttgttatctgtacgcatgacataatactttcctgaatctgtttttacctcaaatgaattcatgtcagcccatccgattagttttgctctcacatgcttttctgctttcactgtagccgcttgtgcgggtgttgtgtctgctgtctctgctacagttacgcctagtaatagtgctcctgtgagtgttgctgatttgataaacttgttcatgttatcctctcccttaattattgtgttatttctcttaatctttgtactccacaattgatgcccctttaagccagcttatgttaaactcatcaaacttctcaataataaacgccccatgcccgtcttcatgcgatatagacatgttatgcttcctgcaaaccttctcaatttcttctaaaaatttttcaactttttcttttttcactaatagccctccttataattttatctcatagttctaatcaaacaatctttttatattttccttgctgatctttcctattggtgaaggtaaaaaacttttcagaaaccaacgtgcattgtcgtttttattaagcgggtcgcttatatgtgttagtagtgccttatcttctgtctcgtctatgatgatgtatcttttatctgtaaacataataacgtgccctaatgtgtgttctgtgtttttacctttcatggttaatggttagttgctccttcctatccgaccaatagaataatatcatttctgttcaaggtgacaacgtccagtccttcgtattttaggatattgtcagaaggtacatcatagttacctgctttcaagtccttaacaaacttagtgtatacaggcttggaaaaaaccactgtgttaatgtctttgcctatccccctagcgtcctcgatctgtttgtcaatgtgtttcttgatgttcatgtaaagtagcatgttattcatttgtttcacctctggtttttctggtatctcactctttagctttaatatttaatctttagtcataagtcataagtgatcttctctgtatcctacagtttcagtatactgtcctaacctgttttatgtcaatcccttatttcttattggcacattcagcacatttatttcggtcatgcgactccccaacaagatatgccttcccgcatccattgcacccgctaactctgtatcctgcaagttttgtcattatagaacaccctttcctgtcaaaatagattttacgactctcataaacttattagctggtttttggcttttcttaactgataagtgattggcttcgatcattgttgtaaagtagttatgtaaattagatgtgatttcttgtttggcttgcatgtttcgtgctcctctctgttcgtctatgtttattatatgctattgttgtcgtaaagtcaacatgtttttttttaatttttttttatgtatgcggttggtggtgtaccaacctattcacggatatatagatatattttgtttgttagaactttttgcctgtctgagtttcccactcccggatagtctcaaagtcaggattttcaataacgttatactcataaacctcttcaatgaatgccattttactgaatgaatttatatagtcatagatagcctctatttctagttcttctggtgagtttgtaataaaatcttcacagcaagattcccacaagtcattaacattagtgtacactgaaaactctcctgtttgacaatcacgaataataaccttgttcatatttaatcattccctttcagttggtatattgttagtatacaatagggttggctaaaagtcaaccctattttagatttttttttagtcgtcctagccctgtaagtaagctttattaaacgccttaatcatgtgcatcatactagggtagtttttaacccttccgtgacgatcatcagaagagaggtgtcttccgtagtatatcacttctgtaccaaattcgtattctccagtgtgtttatcctgttgtgcaatgagataaactttcccatttacagcgttcatcacttctatagagactttccaaaagtcttcggtatcctgtgtgcgaggaaagcaattatactccggtatgtctaactcattgatcattctgtcggcaatttctttaaggtttcttttcatgtttatttcccctttcggtttcccttgtgttatcttatatctttattatatacacaggttgccggaaagtcaacatgattttttaaatttttttttacagtttatttatttctttctgagcgtgtagccagtcgagaatgtcatgagtcacctcatcaaaactcttatcaaatgggtactcttctgctaggttgttttgtgtttcgtcatctagctgctcccaaagaacgcagatgtctttagcgtggcgataaaaccccttcagagattgtaccaacaattccttgttatgcccttcattagttttcattattgcttccccctttttcaattttagacacttctgttttctcatgtagctgtaatatgtctccggcaaagtgttcaatcccatcaccgtataacaccttacaatggtaaaatttttgtatcctgcgggtgatgacttttactagcagggattcaaatgtaaacaaatcacctatggacggccgatactcttttaacgccttcatgacttaaagtaaatcctcaattgtaacatgtaagtaggattcacactcgatttcatcatagtacatatcaataaagccgctaaaacttaaggggacttcaatatcacttgtaccttctaatgtgtgaatcaacctatcaaagtgctctctgtagacctctgtcatagtcctagcgaacccgttaggaaggtcacggccttctggtgcttcaaaaataactagtgttcccctctctgttcttgcctgatctgttttcattctatcattccctttctgtttaaaagttgctgtaaagtcaacatgtttttaaaactttttcataagcttttctgtcattcgatcaacgtcctgacataccgcacttaccttgctaacgtagttgtctacggctctctgattccgtttaaatgcttttaatagttgtttcataggaatttcaccgccaacgttgatacaataccgataaccataccgacagccgcaataccaaacataccataataccaaaccatatccgagaaatgagcgtcctccgtatcaaagaaatacatgttagctttcttaactaattttttcatatgtaatcgccctcctatagtcttattatgtattagggctaacatcttgtcaaccctgttttaaattttttaacttatttactctgtcccagaaacttttaataattttctttttagacatgccgggcgctgaaaatgtgaatgtctttcttgtgctattgtctgtgtaatgtcctgcgtagccctcttggccttttctcatatgaagaacataatgaccgataacatacttttctaacttgttctcaaggttgtcagcgtatccgttagcttttaacctcattgtctgcaccttcttttcttttgttaatctaagtatatcatcatgttgtctaactgtcaacaagtttaatacagattttttaaattccttaaagacttatagacagctagtaaggtttctgtatcccctagtgtatctttgttcgactcaatatgccaaattagattgttgattctgttttctgtttgtttttccttatttttaagccattcattttccagagctaatttatctagtcgctcatggtagtcttgaataagggctagtgaagtatctaagatcgtataggctgtatctacatccatctgcccttgttcctgtgcaattcctaccatgtttctaatctggttaagtttaaactttaggatatcattcattttagtttcctcctcttgttttgttaattttattatatgttcttgttgtttaaaagtcaacatgtttttaactttttttttatgtataaggctgacaaaagtcagccctttatttattactcttcctcttcctcttcttcctctgattcttctagcagttcctcaagttcatcacttaaatttagatgatgctttacaagtaataaagaatctatgatatcatcaatactgctttttaactcctcttctacctgaaaatccgtaaagctttcaaggttaccatatccatcaaaccgaacatactcatctgaatacgtatactcaccaaagcagacagctcgaacggctttgagtggatcgtccctgaaataaaccttgaaaaactcttcatcgttctcttcaaagcttagatgctcaagatcgccattccatccattaatttcccttactacgtccatcaattcttccatatcgttaagtagatagtctcttacatttttcatttttaattctctcctttaaggttattttttgtgttttcctcatatctttatactatcatggtgttgttctaaagtcaacatgtttttaatttttttttatgtagtatgtctctagctgtgaatgttattttgccattggagaatctttttctttaaccgattgtatttgtcccacttcccctcgttgtgtggctttgcgtacttattaatcttactttcataagaaccgattaacatatacatttgtaatgtctgatcttgattaaattctcgttttgtagctgtaccatttttcattgttataacctcctgtgacttccttatgagtacactatatcacggtattgtctagaagtcaacaagaatttaaaaaaaaattatttgttttctttttgctctttagacttctcttctaactcttgtagccttttctcaagatttctataatattcgtcctcttgcctttgtcgctcttctaccctatccatatacctgcccccactcacccaaccaaatataagggacaatccaaaaagcaaaataaagaagggagaaggtataagagagaaggcaatatagaacataatcacactaaaaattattaacccccatgctacaaaagtacgcattataacaaccccctttctctaatgtttactaagttttctgtgtcgtcatacgtatattcagataaaaattcctctagcgtttgcggctgaattttgttttccagccaatcccgatcaaaaaccacttcaccatcgtatccgtacaatttcactgtattcatatgaataccctccttattaattgttatgtgtttagtcgatagttacacctgtgatactctcgaagatcgctatttcttcttcaaagtacaacctgtaaatatcctcgttattttcgaactggataaaagactttgctccatcaatgtactggtaagtatccttaaatatatttaaatcgccgccactagcatatatggcttcctgtacttcctttaaagctagatcaaacattgccttaactaaccgattcaagtttactgtacgaatgtcggtcatagcgtagtcgatcaggtctttcatagggattacgcacccttctaaaatgttcaaatcgttaggactacagtttaacatttcaacaagtaaatcagtcattttactgctatcaagcatgtcataacctccattcactgacaaatttttatagttgattagcgacctctacagctaagtcatgaatttcctcatcataaatcttctttaaaagttctttttgtttttgcatttttattctccctttttgttttgttaattttattatatgctcctgttgtttaaaagtcaaccatcttttttaaaattctctaagttttttacataagacaagaaaactttcttttcccttaaccgtatagcgggtttatacccttctataaacttccctttcttaatcttatataaagcatcattagttacatcataatagtaagtcgtttccgttaatggactgtaatagccccacccgtataactcgtatacattagtatatgtctgttttgttagaaatgttattttatccgtttcggtttcaataactcctagttctgtcagtcctcttcgtcttgacttgtaggagagaccgctgtctgtataaaaccctttaacatggtatttactgacgatatcctttataatgtttattgtttctttctcagcttctctagtcttcttccacagtaacatgaaaaccattcccctttcttgcttccttctcttcattatacaccgctgttatggcactgacgtaatcagttaactcataaggtacaacatcatcaaatgaggcacacttccaatctacattgttagaataaaattcaagtctaactaccattaaatactttgtgtagatttcaacaaaattttgttcaggtgatacaagtaagactaggctgttgtcgaaagtcctataagttttatcctctttctctttaataccttcttttaagcactccctaaaaacatttaaaatcatctcatctgtaaggaccgtaattcccattgttaaaacctccattattttttttgtcgttcgtctaacaccatagtacaccgttattgttttaaagtcaacatgattttttatttaattattttctgatatgctccggggctttcggtgcaggcgtaacatcgtcatgcatctttttatatgcggacgcttgaccgtatccccaaccgatatagaaggaaataaaacataacaatgaaataaacataattaatgaaacaggtaatttattttttcttttgtttgtacgagtctccattacacacactcctctcaagaatctatgactatattatatacgctctgatttctagttgtcaatagtttttttttaatttttttttctgtaatttttaggtaaataaaaaacctgaaagaccgatcccgatgcagggagctacttacgttttagccttggtgtagggagctactaaggtctttcaggtttttgcagggagctacttacgttttagccttggtgtagggagctactaaggaaatcatcaaaggagaacctgttaagtccagcattaaacgttctaacgtactcctcgcccctcatctccttagggatataataggttgagcgtaaccattcaatgttatcttttacaagagacttatgggttacaaaattgaaaccatgataatggataaaatacttgtcctcttgaggacacctatcctcagtatctttcttaacgtcctctgcgaaccattcacaagcagaaggaggataaccaagagtaataccgtagtctaaattagaggtataaagcatagcaagcggagctgtataaaacggagaatcaaccatttttacgctcgcttttttagcgtactctgagaaattatacgcattttggaaaactagggctcgaaatcttcggtgcttatccctaggctctataatcgtatagtaactgtgtgtgataatagacacaacttgttctgccaaatgctctcctatggagttcataaggtctgcatttccatatgacataacactaagcgcaggtttaattccatgcaagaacagccttgtttctgggtctaagtcttcaaaagtaatacctaaatctttgagttcctctctaacattagttgatggcttaaataatccggtcattttaatcctcctatgtttaagtatgacgcagggagctactaaggttagtaagcatcgtcatagtaaaccatgtcaaatgtaagctcttttttctcctgatataactccatgtttgccgaaatgaactgactagcttcttgaactgtgctccctgtaaaaactttgtctgtaaacatttccatacgtttaattaacttcatctgcttttctgttggtggtctcatagcttattacctcttctagtcttttttaaagtactcatcgaaagcctctaacggaacattaactaggttaataggtaaatcatcttcccattcaaaatcctttgactcttctacactgcttactacggtacgagactcaaacatgtcgtcaataacgtctgcgacatgctcaacacctacgctgtcatgaatacgctcatcaatatcaacaatgtacaattctaccttaaaaattttagtcacggtgctctctccttattttggtttcaaccctgtacaggggctacttacgtttttcactttctgtatctagggtgttaaacggtagcagcgtttcagtacgatcaaactctctatacttctctaatacagtactaagttcgtctgcatacctgtgctccccttgtgcttttctgtgagatatcttctcttcaaggtagtcctcaaaggtctcttctcgaacatcgtactccccagttgctaaagtgtacattaagtcttcaaacttcactagattcaggcaggcagaactaccttcccaacttcctagttctctgtagttattaccctcccattcaccgaccatcatcttacatatttcttctaaatcaaaggttgacactaagaaattgagcgcctctacttgtcttttggtgtacacaggcggttttctgagaattgggccatataagtttgccattatttactcctcctcctgcaaagtttttgtagggagctactaagtaactactcccctattctactctgcttgtaattttcttcgctatactgttttctcactttgattcctccttagtactgtttctgtatttctttaatcatgtctagcataagtttttctgcttttggtaggcttcctttccaaataataatcttctcatgagccattccatctctaatagcgagcaacataccttttttcttctgtttaatagcctcactgataagagatagaatagggtaggtatctcttagactaattgttccacaatactggtaggcattagagaagggttttttagatagaaaataaaaaccatctattttttctttaccaccctcccagcacgtttctgtacgtaactcgacatctgaggagcaaaacctttttatgcgcttaatcattttcttttactccttttgttttttacttttcgggaaaccaaatatacttgtatgtcttttttcctccatgtcttcttctttattttttgtgtttttaagagagtctatctcgtcttcatacatttctactaagctttcaatacgtttgttaacaaacttctcagcgttctccatagtcttacggatgctttcaactgtatctttaccagccgttactcttacataatctgtgtaataaactatagtgccgtcaacttttttagctaatcgaagaatctcgacaggccctatgtgaggtaacactattatgtctcctacttttagttgacctccttgtacttctccgtcatagataacaatgtttttactacttgagtacccacggtgggcttctagggatactaaatactgagtaggcccgtatgtgaaatgcctttgcacccaacttgaatcgaagttgtagattagggtttcctctttaccgaaaaatacagcttcatgtgtattacccattctcttcaccctttctatttttaatctttctaatctcaaacctccacttgtaagtatctttacctatcttatcgtacagcttccttagtgctttagacttggaaggttcttggatgccgaaacaatactttttagatactgtgttatatattccataactaatatcttggttagccatacgactttcctccttagtgtaaatacgggcttgtagaaggtaagttaataaagtctacttctgcttccgtgtagtcttcttgataatacatgtctacaataagagacaccagatcatccacttcttgaaaagtggtaatctctccttcttgttccctcaagatgtttacacagtccttaaaacgagacaacgacttgatcatttcctccgggtcctcaacttgtttttctgccgctgctagaagctgagtaagaacgctgtctaggataagtgccagttgatctttagttaaggcattcatttactcttcctccgattcttcagtgctgtatcaagtctatcaaaatattttttctcatcttctaaggagataaaacattccacgttccccatacctctatactcttcacatatttccttaaacttgtctgcaagggtagtagcaacaatatcatccccatggtgcttccttctgtctttaagtgcctcatctattacatcgccttgtttcaacaatacatttcgttcagcagccaatatccagaaagggatgcttactaagttgtcagcctttttgctttcttctttctcgatctgtaacctgttgatctcttccataagaaagactaaatcttccttttctaccgaaatgtatggacctgtgtaatcatcataaacatccatgatcctctgcaaccgttcatttctctcttgttcagtcactatatctcctcctcaattagtctgtaaccagagtataacatacagtgtattccattgtctatagttttatgcaaaaaaaaaatgaaggatttaacatccttcatcttcttcattgtgtacatgttcttttagtatttccagagcttctttaatctgcttgttatacttgtctcctttttcggtgtactttagctgctcttcaagctctgcaattacttcttccaccgtagaaaacccccaatacgttatgattctctatgtttcttcattcgagctgccaatgtcaatttctttacaacagcctttcttgttttgatcctgcgtttcttatacaagtgtatttgggctagttctattaagttaccttttaccatatatgtatatcttactataactcctcctctactgacaactcaagaatgtcttcgagttttgttatgtctaaagcgtccatgattttagctagatggactttattaataactgaccgggtattgtgagccatttctgagattgttgcattcctcaacccggacagctcagcaaggtctttcatcttcattcctcgctcttctaatacttccttaatctttaaacgaaacttatagtgtctgatcgccatactgaccactccttcagattttgatagtgttcagttgcttgatgacccgagcttcgttagcctgcttcacaataagtttatcacactcacagtcttgtacaacttggtgtgacaagcagtttagaatccgaccgaagatgtctaggcggtaggggaagttaatcccgtgcctcctgtaccattcttcgttgagctctacatcatgcaaccctgagaccatctgaagaagctcttcatcggttaatctactataatccatttgtacctccgtttaataagctaggtctctctctgtataatcatatgatgatgaagctaaggagaatatcgttccattgtactcaagaacaggtttaattgctacgtgtacggcaacttctagcctttcacggtgcctaccgatgtaatatgaatctctccctgcaactctattgtagttgatctcctccgggcgaggaatgtctcccagtcctagtttagctaggtcaaattgcgctctggccgctaacttcatctcaacttccaccgagtcttctgctcttagaatgttattgtcattcagtaggatagtcgccgtatgtttgacctctgaacgtcctatagttttaaccaccactccatagacaagaactgtacgtattacaggtacatcaagtttagctaacatcgtatatcctcctttagattatccgatagaagatgtcttcaataggtctctaatacaatataagactagagacctttgtttttacatcttctgtatttttaatttcctaatctatatttatacacatcataatcgtgtgattcaatattttcaaaagaccattcttttgtgtctgggttgtaaatagcatccacacggtaaagaaccgtagctttttctttaccgtagtctcttgctgtatacataccaataaccctgaaggtgttttctttgagttcagctacttccacattatccttatcaaaatcatataagtctttaccgtaaagatcataaataaagttttctacctgcttgtgtgcttccttctcatctggcttaccacaagcggctaaagtgaatgcaatcataattgacaagaacaacaccgtaaattttttaaacattttatttacctcctgtagttagtggtcagttatctcgaatagtggaatattccgcataacttatagcctcttcattattaacccttctcagtaaatcttgctgaatctctttttcaatgtccagaataagcgcctgtataatctggagatccctaaacttcccttgtcttttctctagagcgtctttatcttttgttcctaagctcgctgctaaagcgtcaattagctcttcttctgtatctttgtacacttgaagcagcgtttctttaaaatctatgggctccttgatatactctacagaaacgttgtatcccataattatccctcctcaatcctttttaattgtttaaatctccggatactccaagtcatttctgggtgagatgtgtaccacagacgtttgaatagctcaataaaagcaagcaatgctcgacgatcaaacacctctggagcaaacataacgtctttttctagaagctcatccaggttatgctcctctgcaaaaggtttactgtagatttcagttttatgccaccaactacccggctccctttctactctctcctttaatacaaccactttaccgaggatatgcactgctgctgagttaactaccgttatcatcttagggtcaggtaagccagcaataatctccttcacaagatcttcacgagtcattaaactaatatccttatgatccataaactactcctccttttgtttatctaggtcttcactaatttccttctgccgttccatcaccttttgcatgcctactaatgtctcctcaagcttctctttgaactctttaagactcttctccctcgcctctcgtgttaggtgggaaggagtagagcaaataaatgttgctttgtcctttttgtattcatcacccattactgtaacgcctccctagcttctttttctaactctctaaggtattctctccagcttttaaagcttatccacagtccggtaaacatccctacattcccgacagttaacatcgctatagcaggggcaggccaatatacttcaatattcgatatagcaaacgtccctactactaataagataaaagcgttcattcctgcaattttctttaatttctcccaaaatattggtttccatgttataaaatcgtatttaagcctttgtcgttttaccttttttcttgcttcttttacgatgccatccaagtccgactttgtaaaaacctcagaatccagtatacctgataaatactgaaggttttttaatgcgtcagatagttcctcattcttcatcaacgtcaccttttccgtttttcaactttttctggatagctgttaaaattgccgcagcaacacacacaatgagtagtgtaatcaacatacgttttattgacccttgaatgaatattaggttaataagcgccgcaaaccctccgatcacccagatattaaccttcatgcctctcaaattgcatcggctcctttaggtatacttcgtttcttttaagctcgttaatagcctttataaccaataagaacgacactgtaatgcctatggctgctccggatagtaatgttaatactcctgtaagtagcaagcgattgctatagtcagacaacatgatgaatcctgtaccgaggaacaacgccacacaacaccaaagagatacaccccaacatttacggaccacttgttcaagcgtgtcaagaacactacgcttcattactgatcgcctctctctgtattttatagtttcgttacagcttctatacacagtatagtatagaggtcaactcaaagtcaacctcttttctgtatttttttttaagaagttttccactcactcaatacagagtcctcagcaatgagttcatatcctttcgatctttctttatgcttaatgagccatccttcttcaacaagagcacccataaggtctttcatctttgtggtcttaacacctaactcctttctcaaatgttctacccgagtctctccggtatctgcaataacctgcttcagcttattaagctcctcgttatcctcaggctcttcttctacaatctcaggctctacaactttagggaatttcccactataatactcagacaagtttttatatacttctgcttccttcgtttcgtccggagatataatggcgctttggaatcgttgaaactccttcggatacccttcaatcttcataactccgtcacctttaccgagtagcttataactgataccagacccgaacacagttttatagtttgtattattgttaaggttaaagctgatagcattcgggatgttggcttttattcttccgcttacaatgtctgcactaggtctttgtgtggcaagtactaaatgaatgcccgcagctcttgctttttgtccgagacgtgcaatgtactcctctacttctttatttgtgtcctttagatcagcatattcgtcaatcacacaaacggtataaggcatcttatctggagatttcttgttatacagctgaatgttttttacacctgcatccttaaactgctgatatctattttccatctccacaaccaacctctccagctctcgccctgcttcctgcatttccgttacaactttgttcacatgaggaaaatccttgtactgctgaagctccaccattttagggtcaatcataaccatcctcagctcttcaggtgtgtagttaaccaacaaagttgtcactaaagagttaataaaaacagacttaccactcccggtggtacctgctactaacaaatgaacaagcttagctaaagacaagtatattggattatttacttcatctactcccgcagcgaaggctaacgggttttcttttttatacttaatgaaatccgactgttcgatgatctctcttaggcagataaccgcaggttcttcgttaggaataacaaatttaactgtatctgcggtttctccttgttctacacctaaagacgggacacctaatgctgcttgaatgtctttactcttctgggtaatgtgtgttaggttctttcctttagggatatcacactgaacaacggttaatcttatccctgctgtcatcgactcattatatatcctagccttgtcaattagtccaactcgttttaatgactcagcgatcctgccaattagtgtctcgtcagctactacgttttctctggtgtacttaggaagaagatcaatagctccgcctataggttttgtagctgctacttctatagaagggattaattgtgtctctccacctagtagggagaacagctctcgggtacttatgatctgttcacttgtatcagaagtgagtacgcatgactcaaagtgttccgctgctttattgtgtgtctgtttaaacagcctaatggagttgtacgcatcatactgggtaagagcgtttaagatgctacttttaattacctcttcccgggaagtttgcatggcaacccttagttgaaactgaaatccatcgcttagtaacttttcttcaacctcttcaatatactccggtgaaggactaaatgatgcaatcttgttcaataccgacaatgttttctcctgtagtactcggccgatcttagaggatgaggggtactcattaccttctagataacttctatacatgtctagagctttctctttccaattgtacttcttcctaaataaccactggatatacactcgttcttcaccgtagagactgatttcctctatatcacgtataaattgccctctaagagctccatacagcggcaaaaagtgtggacgagataaatagccctcgtaaaaggtaaaaccgtctgtagaggcttctctgtgctttctcgtgtgttcacttaatcgaatatggggaggtgtaatgagagacttcctcactacacccggtgtcatttcaatttccagtccaaacagtgtgtctgttacctctgggataatcctttgcagggagctacttacgtcatcagtgtccgtgaagcagttggacagatttttataactcggattaactttaagcatcatccttaccacctgttactttttagtcttagatattactcggtcatacacttttttaacggctgaagacggacgggttacaatgtcgatcgtatccttaatatttctttttactttcttcgttgtactgtctgtgtcatacacttcatcaagacctccacctctgtctagatgttttgtcacaattcgtggtggagaagtcattctattgaaacctccgattaccaccaacatctttacaatcatcccggtgatagcagaaggagtcggtattccaaaaataaaccacccaaggataagcaggaacaacgagtagtatacctgaacaagagaaagatgtttcacgttatcccaccattgtcggaaaaggtgtctgtacggatcgaatatccaagcagtcaatgctaaaggggaaacaactcctagcaccataatatcaaagaatcttcggccgttttgccatagcacgggaacaattgatgaaataagaataccatcgaacaaaaccaaggtagccacatcaaaaaatgaaatcgtctccgggagtgagagagcatccattgtttttgatcccatcgatattaatgtgtctgatattttattcagtacttcaaacgatttttgaaatagaaagggaactgctgtaatgatccctgctacgatcgcccaccttttcaggattgttttgaacggcattggttgtgcttttctttttcttagtccggtgaacattagtttaattgattctatagtggtgaggacagatacaacccctattgccagtatgctgaataaataagttgtattctcgaaccattcgttgttaaatatccacagcggtgtcttcagtattagtgttgcacatagatcatatagccagctcattaagtgtacagacatccctgcgatgttatgtggaaggtccgagaagaaattaacaacagttgttatcgctttgtttattttgtctattgcctcgggtaccgctgtgaatacgttcttgtcttgccaacccatctttagaagatcaactggcgctttcacatctgtagtcgctgcataagctcgagatgttatgctggaaattactgtagttgataaaacagccacgggtgctacgagtgttgcctttagaagagaccgcttaaaactggcaagtttttgaaaaccgtctgagtcagatagaacaggaggtacactattggaatcgaaactagaacttgaacgagaccctttataatgtccgttgaccatgctgtagcttcttctctttttctcatcatcctgtatactcctgctaaggctagtagcgacatcgacagcgccactccaactgacaccgtgattagtgctaaagtgagtccaaattccatcacgactgcgggtgttattgctgttccccctgcttttactgctgttgttcctgctgcaaacaccttgggtgaaatttgcatccccgccccgcataccgttagagagacctttagtagcttttttaacttctttattttctttatcttttggttctcttccccacacaccacctcctcctttaaggtctctgccataaaaagcacacggtcctcaaccttttcttttttattccctagtacaaatgtagatgttgggttaacgtaggtcactccgggaattaactcttttggagagattgtcaagtttatcacggtgaatacctcctctttgggactttggtttatttgaaaactccggctcatagctgtggaaccatttcaacgctgcggctaacccagtgcctgcggagcaaactgctgctactccacctatggctaaaagtaatccagacatttttcattcctcctgtataattaaaatgtaagtggtcatactaactcttgaaaggaggtaacaaccatgttactacgagataactcgattccccgatatgagcggcaaatggataatgttgaccatctcatacttaacaccattcgagaaaagaagggcgtcaacatatcaatgaaagaactaaatctaatacttgaagccctttatgaatggcgggttctagattgacaatcacattaagtgtcatttccgataatgtttctgaaaacttactcaacgcttcgttcaacatatctagtgcacttagcccgttattcatactcgaatgcgctgcctcctttaaacccttattcatatcttgaagaagctgtacgtagggtgttgggtctaaatactggccgtcttcttttataccaaagtgcaaatgcggtccagtactaaaaccgctgttccctgagtgacctattaattctccagcgtgtatggtttggccgttactcaccgaaaagtccgagaggtgtccatagatgtaggttttaccatcggccgcatctatgaacaccgtttttcctgcgttcgtatttccgtagtcggctacacgaattgtaccgtctgcaattgctctaagatcagtcccttcagccatcttcaaatcaactccgttatgaagatgatccctgaacggctctttgctgtgaaacccggaagtgatcttgtatttcaaacccacaattttcaccccttatttacaccctattttccttatttccctgaaaaatatacactcaaattccctgtgttttggccgtttttcccttgaaatagcgggaaaaatgggaaagatgtagtttgggaaagaagaagggaaagatgcctttaaaagctatctaaacgatcttcaatatccttatcggacaactcttttcgttccaactcgacttttggcagctcttttggattactttgtatgccattttcttggtgtacaacctgtggagagggggaagcagcttttggactgcttctatatttaattccgtctctaacaagttctctgataacgaaggagaagtcataccgctccccgatcagtggatcaatatactggaggatgtcttgatcctttttgtcacttagatagagggttcgtctgttgttcttcctacttttgaacgtactcacgattaccaaccctcaccgtaatgctgcttgagctcgggcgtttaattgtcttcttagcttgacggataccaaacttccttaaccctctcacattagcatatcgatctaagaagactgtattgacccgggtgcaccctctctccaagtacgggcgcagtagctcttggtctgcccctcctccagtaaacacaattgtagtgacgaaaccccatgagttgattagaaccttctccagtgtcgctaggattgtattggcatggctctcataaatcatgtcaatcagcggtgtaatgttcctgttctttatttctttgctcttgataatttgtggcagcttaccatccgggatcataacgtcaaactctttctctaaatagttaccaatctgactataagcggtgtacataccgtcattagactgaacggacagctctggctgctcttccaaagcgtctaaggttagaatgttcagtgttctggctccaatatctacaactacattaaaccctttggctatatccttatctttaatgtctccattgtcgtcaagaattacatcacacaagcttccaaatggttgtttctttatttccacctcttcaacagtaattgtcttcttaacgaagttcactccatcataactaatactgacttggtgagtacctctggcgatgttctctaactctttacggcgttccggtgtgtcgtatttaatcggaagattcatcataagggtatcaattacttcatgttttccagaactcattaatcctaatgtagtttttaaaagtactgggaagcgcatatcggcgtgtttattctctccaccagcccatcgaatattaggatcaagtttcatagcgtaatcacccactacatatcttcttcctttaatctcactggcaacgtattggagcttacttttgtttgaaaactcatcctgcggcttttctttaaatgttgttacgaaggaaggtatgagtgctggaacacctttgctgtcaaatttcacatcaccataaccatcgtctaacgccttcacattgaaattctcttgaaatgtcatacaaatgtcctcctttgaaatacttcagcatactttgtaatacctttgtgattcaatcttatggaaggacaaaattcgatatgtctgtacaaaataaaaaaaaacaagggataacccctgttttttcatgtatagattgtctatcagtgcagccctctttatttatctgcctcatggaatatttgcctaaactcttcttttaacgtttccagcgctttttcctcctcaccgagacagctaacgcctttaatagcctcccacaaatactgaagtgtacgcgcatattcaatagccgattctcgaatatactcaactttagcggagctgttctccagtttttctctaagaccatctttgtacccttttaactcgtcaactatctctcgaatattctttcgaagtttcgactcattctcattagccttatggagttcttgaatcgctgctacaaaagttgttggacggatttcagttctttcgttttctgccccatcctccgttgcctcttcctttttaccgaactcctttccaagaaaaataattagctcttcaatccgaagtattaattcaccaaacaagttgtgaatcattttccagtctccagttgtaccttcaaaggccgtagccattgaaatgacgtctgctctaatatccttgagttcttctacagggtcttcccacgcataataattggtgaaaatgttgttaacttgtttacagtagttatgatacaaactaataaaattcctttgtacagtgtccatagaattaaagttctgtaaatcctgttcagaaagctttgccatagttaaacatctcctttgttttccgtgtataagttgtcatctcttcaaacagtttatcacaagagttctttatcgtttctagttcactcgcctctccatcaactagactagcaccttccaagactctctgtagatattcagctatacgtgcgtattcataagctcgggcttgaataaacccgtgtatagtggctgtggcaggactttccacaacatgtttatcaagccttctcttacgccttttaagctcattaattgcttccttaatatttgtttgaagttttggctcagtcgtatactccttagcccagagactgcctagttctttatttttcttctcccacagttctttcattgactttgtcacttcgtaatcataaccaaactctccagcaaacttctggtacgctaactttaccatcttacattctttttctaacattacaatctgatcataaatctgttttccgttaacaacctgctgctcactgtttgttgtttggtcactcactttgctcaccctcctcactatctgtaatagtccacgccgtcatgggattattctcaaatttttcatatatgctccaagtatgttcttgaaaatggttatcgagagacgctaactctgcattcagcctctcgatttcttgtgtaaccctgcctaggtcttcctcgatgtatgatgacttcctaagtgcttcctcatacgcttttatatgctcataagcagagtctacgacattcaaaaagaagttctcatcctcgatatccacccagctaaggataatgagcttgtcttcaagctctaacccatttttaaaaggttggaatacaaagtaaatgtcttctgctaagtttccttggaggccaatgtaagtgagcaataaaagtttgtcaaacccgtcccgcttaacaggctcatgatctggataagttatttctacaatatctccgacttgaaagtctgtgttaaagataggcaaggagccgacccctaatgaaatactttccttagttttttcaataatttccctttgctttgcaatatcttttatacgattatccattatacatcctccttaaaattcgatcttaatgagccagtcgtcatctgtcccccagccagggacgctgcgatacttagcagaatatcctctactgattagaatttcacacgcttcctgcacatgatgtttatgtgtgaattccattggtaactttataatagcatagttgtctctgtcctcagcagcttcccgaatcgctcggtctgcaagcttaataatttttttaactggtattttcttttttaactcctctacccgcttattcctaatagacgcagcctcttcagccgaaataggtatatctctcttcttaaacaagccagtaaagtggatcgggtccttacttgcaaacctatctagaagaaagaaaaggattgtccctacaccaaatccgataaaacatgcagtcatcgagatacctcctcccatcatttagctaaggcttcttctgcaggtatcaatttatacttgtctaacaactccctagctttatcgctcatccttgatcaccctccccgctttcatgttcttcttcaagcttctttagttttaggtaagccctctttgctctccatagctgtattttggatcggatagcgatagcaggtgctaccggaccaaggaaggtaatgataagaaagaaaacccaccaatacttcattgtaaagtctttaagcatcctcccttcgtatgtatcgtacaaggggctaccttctttaagcatctggtctacaaaaatggacttaaaagcagttaaaaaaccaatagccaaccataagtacaagaaaagtgtaaaataaaacataaataccgtctccttctttactcgatcttattttaaaaagtcattttgattgaatctatatcttttaaaaagctcggggtcaatgcactcttctttaacattatcaaagacccaccgaactgcctcctcttctgagtcaaactctagtgatctgccacgagtgtccttaacaaaatcatttgggttgtagtcatgctcatcgaaccactgcatttcaactacagttaccttacccttaccgcccgctgaatcaacgtacataagaattttataacaaatatcgttcattatagttatctccttccctatatcgctttaaagttgtatactggcttaaccgctttgttaacaatcaaggagttttcaatgctacctaggatggcttccacaggtatgtaggcctttagagcttcgtctaaagtactttcccaaaaagataaagtccgcacaccatccacggcatctaagaaatccggcgtgcttccggaggattagtgagctgtcagtgcggtttatgtctgtttattttggaggtataatactactcgtagtacggtttcgtgtagtccgttactattcttcctccacatgaacagtctaatttcattactttccacccgtctttctcctctttttgaggatctttaccgcatttattacaatacatcggaaacattaattttttcttcttcgtcatcatttctcacctaccaaagttattgaacgatttgtatcttctgactcacacctatcccattctgaactattcggaattccctaaacgttgaagtaactccagttatctactggaataattacttctttatcttctgttgcatactatgcaagctaaacctcctatactgaatgctggacatcgttgtcctgagatacttcgcccctctttaaagttctccatgtctcttcagtacttctttaatctcatctgcataaggtttatccatgtctactacgaggtaggctttaagacctttctctcccctttcttctcgtttcctcaaaatacgatcagtaatacgaccaagaatctgtagttcagcaggagtagttacttcgattagttcactcgccttccacaccatgtaatctatatttttattggacttttgctcttccatgtattaccctccttataaagtctgtaacttctatctgtaaacagtgtaacatatagtcttattactgtctatagttttttattcatttttccaaaaaaaaataagaaggcaacagccttcttattattctcctccgtactcttctagtagtttacaggcagtatctttgataatgatctcaatagcaactttaggaaaggcagtatacatatctttgtaaccgcgaacctgcatataatgttgaacaacatcgtacttgagctccttattaagttctgtaatccgttctaagatgtcccgcatgttatctttaaaaatcttctcatcttcttctgttagaaaaactccaaagggtccgaagtttgtatctgaaaagtttacatctggacgagaatgtttcatgtccctaattccatcttttaaatatgcaatcgtgtcttccatgtcttcactcttgttcatctcttttgcaaggatatctaccgcccactgtacattctttcgaatatctgctctcttatagactccttcaatacgtttaaaattcttaaggtttttcatgctttctcctcctacttaaatattagtatacgttactcttcgtttcgttttaatagaagatggctgcttaaatttgatagatgatgtctgagttgttgtaaacttatcaagaccaccagtctctactcctccgccaaatgtaaagtctgtacggattaagtctactgaagcagcagaacttgtaacccacatagatgctgcggaagaattaattacattccatttacagtcgatcagtttcaagttcttaaaattagttagatagaaagttctccaacgtgcaggcagtgtgcattttttgaactcaattttatctgctttagcatctccaacttgttcaagaattttagcatctcgttttgtattcacttcttcaaaatacatgttgttaatctgttcatttgtaacaagtgtaaagttctcacagccacgcacaattagtttgtcgataattgcctgaacagagccacctgtgtcacgagacttaaacgtacattgtgtataagcgtcaccacctttcacattttcaaatacgatactaccgatgtatttacgtgatgttgtcggttgttgtccccaagcatcaattttatatacggggctgtacaaatagcaatccttcaaaaagaagtttgatctaggtcgtgtttctgctaccataaagctgctgctattacctttagcactctcgttaactgtacatctctctaacaaacaatttcctgccaagtggaatcgtttaattgtacactctagcgcccgtaaagagtagttgttaccatgacagtctagtccggctaaatctacagcgtcatcctgtccgatcgtacatctgtttaggactgtatcgtatgaagtctcttgtccagttgttgtgtatccgtgtctaccactattcaaggtagagtgcatgatcatcaaaccgttaccggagtagttagacacaccgtagctttcagaagaacctgaccagtatgctttacctgttttaactcgatacaacagacagtttaatgtcatatccattttaatgttgtggttaaagttgtctactgtaacattacttacttcagagtatttagagaaacggatatttaagccatactctccatatacagaacttccaagagtaccagtatgcttgattgtaaggtcatctactgtaactgtaatcggtttatatacttcgacttttgctccggacttcatgtcataaggaatacgtctgctaatgtagacattgtttcctgagatttttgtaataaggaagttaccacctttataatagtaagctctagatgtatcatataagtctccagtgtggtaaattctgatctgatctcctacagccattcctgatgtactcccaaccgttacgtatgtagtgttggctgtatacgctgcggaagtggttgttgtagcctttaaggagccttcaaagactaaacctcttcctttgtgatgagtggcgacaattgttgcgcctttacctagaaaatgaatgtttttaactccgactaggtctttgcttgttttataagttgctccgtcttcaagtaaaagagtcccatttacaggtgtagcgtcaattgctgcttgtaatgcttctgtatcgtctgtaactccgtcccctactgctccaaaagattttacatatacttcgctcattagttggcccctccttcttatctaagtagttaattttttcgtttaagtttacccagtgttgctacaaatgatgaaacaaggaaaacagggtagaatagaatcctaaggatggatagaagtaaaaccagaataaaactagctactactttttcagttagctcctccgaagtactatctttagattctttaagtgtttttagttcttcttctgtaaaaaacgacttaaatgttttgttgaatttaagtcccgcaattaccatcccgattaggatatagatcaggaaatacatctttgactttcacctccttcaatggttagactattgagtttattcttgataaaagggacatgactctcaggtacagtccctgaattaagcatggtttctagtcgtttaattagttgtaatgttttaagctgatcttttacttcatgtgtcattccaataaaacctgccttataacttagttgggtagttactgaattgtgaactagtgaatgcctaattcttttgctttcttttcaagttcaatcagctcaatttctctttttaaatactcatatctacgttgtttctcttgttcttttcgtatcggctcaaatcgcttctcgtaatcctctttattctgcgcttttatggtttctctcttttgatggcaatctgcacaataacgaaacgttaaatctccgttggtcatagtggatacacagtcagtatgaacaattggttctctttttccacactccgaacattttgacttaaaaaatgccattcagttaccctccttataacctagttagcagtatctttagcgtaggattttatatgatgtgtaaagaactcttccctagagttgaatcccatttcctttagaccctcatcaataccttttgcgtctctgtggttgctgtaacatacaaacaacccatttaaacgaacctgatagtctccgtctatcatcttttcaaaagtatatttcatattaatcatttagctctcctccatttattaggatgtctccttcataatactcgtttccatgtttgtcctttactcctgcgtactgcctgacacggattcttgggtggtctaaatgctcgtggaaaaactgtttaatactctcccagttatacatttgttcagcatctaaatcccgtgcctgaacttaattccattccgccgcctcccttagtctatagattaaagacggctcaattctaccgggcgcaaaatcaatttcagagtctccacaataagggcaataaactggatacttttcttgttctaacagaatcaattcttcgcattctccgcatttgtactcatacatgactaggtttcttcccattattccgccgcctccaatagaccgggattttcatactcgttcccgataacctttaaattcctcagaaatccgcaagggacattgtgctttcctccgaacgagcagatggtgcgcctttctagcaaatattccgggccgtctccaccaaaagcctgcacaaggtttctcgtttcatattcgaccacatcccccggatagatcattttcccttcatcatctttcacgccggttccccacatgagcaccgcgtctttatcatcgctatatacaacccagccgacgccgaaagcgtgccataagaaccaacttccatcgctttcgatggtcaggcttaccccctcttcatcccaataatgcatccgttctccgtcccacactcgatagtgaagatgtgtcattttttagcctccaataataaatcaggattttgatacacgtcgccgatgacttcgatttcctcaatacgatacagaagtccgcccccatcaacacgaaagctgcatgtttcttcatcgaattcaactttaccgagaacgatgtcatagccaccatgccaatgtgaatcacgtattccttttacgacatccccctcccaaatctcccggccgtttttgtcttttaatccggtgtattgcataatattttcgaaaaatcccgttatatccgcatttccgtagtatacccttccatcaaaaccaattgcatttaaagagttgtattccatttttttaagtggagcattccacgcccgaaacttaatctctctcattcccccttacctcccacttagttcttaaccttaaaccgtggtgtaccttttttaactactttaagtcctttgacttttttaacaatatcgtcgggcacatcttcaattttcaacacgctgtcaagcttatctgcgttaactcgaacttcagttacctgagaaaggagttcctctttcagcaccgcagatacgtcttcaagctcgtagtcagtgtatcgagaagttgagttagatgccttagcgtcttcaagctccactcgtttaccaaaggttcctttgatggatttaagatcgttgttttccatatactttttaacatctgttttaacttcatccatcttactctttagttcactcatttgagcgtgtaggttaagatattcatctacttgctgttgaatggatagggggatgtcttgctctactgaggactgtactactcgttggtcttgttgaggtacacccctaccttccgctgctgcaatggtcttattttctgatggattcttcagccacttctcaagctctaaaataataactttgtcgtcctcttccggaggtacttcttcccaccctgcactcttaaacgcttctgtaacagactttacagtgtacttattcgtaaacctgagtggttctgcttgaccttctcgctcaatctctacacctctgtctgtaagcctaacaactgcaacttcaccattttgctgtaaaacaaccttgtttttcattactgtatcctccttcattttgtctgtatccctttcctaacatgagtataacaacagtcggtctaaaagtcaacactaattataaaaagttatagagggtatacagcaataatatctccggttgattagatattattcagccagtactagctgtttttaaatgaaaaattttgtatgtgcagttggtgttttgatttcaatacttttcactgagttctttccgatcgatttagaaacagatacataaatagtgtcgtcttctcggcggatatgaaaattgtctacatcttcaaggttcactgttaccatcttttcatgccactgctctaagtcctctgttaagtctgtaataagagaaggatcatgaagactcttcgcttcttcttctgacactcgtggaggtctaaccatagccccttgcaaagtcgatttagaaggataatctcctgctccaactgaacgtttgtggtgtctatcaactcctgcctcgtctaagactttataacatacattcttgttaatgttatactttttaaaaataaattctagaggaactttagctagatagtcgttgataatcccttgtttttgttcttttgttagagatgcaagacgtaagttccctttagtaaaatactgcttagttgctctgcgtggaacttgaaagcgatctagtgacgaataaataaatcccgaagatacacgtagccgtctctgaatttctgcaacggttgctcctaattgatacatttctgcgataacctcttgaagggcttctttatcgtctacatcgctaactcgttcagcctctcctttaattttttctgcctgttgcaataactcatcaaattcggatacttcttcctcaaaatctctaatcatatcaattaactgttcaactttagacatgttttgtcctcctccatattttcctatattcagaggatatcatacagtctatgttactgtcaacaaaaatatgcaaaaaaaaaatacagggcataaaccctgtatctcgaatcttggctacatatacttatcaagtgttaaatcttcttctgcgtaaatcccatcgtccctagacagcttataggcgaacacatccgggtctacaatcgacacgtacacgccctctacaatagctgtgtccttacgtccatcctcgctctcataaaacactacatcattaatcataaacttgttggtataattaaaggtgttttcttcaaacttaaagcaggtaaacaaagagaggtcattaatgcctatgttgtatgtaacccaaaacctctcttcaccttccgcaggttttaaactgaacgatatctgagaaacggtgtgctttttcttctctaatcgaacaagcacgtctcctccttctctcttttcgaattttttaatgtacagaatctctccactcaataacgcttgcagcttctcttcaagggtatcgtatgttacaaaattgagctctgtgtactcattaggttccaatgcaatcatgctcacttctccttcctataggtcaattcccgctgtttttagtgcttctgtaatgcgcttgtcttcctctgtaaggtctaggttcgcataaaagttttcctcagcttcctctaggtctgcaaacagatcatcatgctgctcttctggtacatacttcataatgacttctgcaattgcagattgtcgagcatccatccgtaatttaagctcacgcaacccggcgatagataagccactaagttggttattcgtcagcttcgctttaagttcaatagccttcatggctaacggggtatctacgacatcaaactgttttaaacctttcatacctttacggataacctcatctagaagttcgatatcattatacacctgatccactttactaatgtcatgtactccagcaggttcactagactctttaagtgtgtttttaaatgtgtctactttcttatccgtgatgtatgtgacattgtctttagctcgcttgtctaacagttgaattagtggtttacctgtacggatggcttcttctcgtttcttcttgtagttcgtgagggaagcttttgaaatacttaaaccattctccttacagaagtcaattatataatcatatgatagctcctcgtcaagcatattgtccacttttgtgactaatttcttattgttgtagagctgcaccagtacgctgctggagctaatagattttttcttcatgtcttttttatctgccattttagttcaacccttccagtttagtgtatttattaaatgtggccgaagccttgtgttttaaggtttctacaataatatagtaaatcgttcaagatatttttaaaattgggtgatttttagagaaaaattaacaatattgttgacttttaaacaataagatgcggattgagatcttgaacatggaaagttcatttaagatatttgttagaaaccttgttcaccttatatatctattatacactattttgtattgttttttacttattggacgtacaaaaaacaaaaaaaaaagagagactgttaatcagtctcttcacctaaactatgcttagaggtatactcacctgctcctctactccatgaaaattctaatcgtgttcccggcattcttggaactctttagttcaatctcgtaggctccattactttgtggaatacactctgctcgatagctattaaactcttcccgtggaagtgttacatacccagtaccagaaccaaacacatagttaccctcagtcgttgtatatgcactaataagctcgtcatacgggaagataacgctatgtactcctgaagacgactctactttaacccagcggatagcccttcctgtgatattctcgtctacaataaggtccaacaacaactttgtatctctaacactcagttttttattatagaagtgagaaaagattgatagtccgttaggctctgcaaacaaaagagaaacagtctgctcaaactctggaccttcttcatcttcccctaactgatgattaatattaactagtgtaaacttttctcctgcaattgtaaaatcctgatacgtcaattgaggattttccatgataagcagcaggtctaggctgtataagtatctagttacagaaacgagctctaaaggcatattgttagtttccccgtcatctagcaacccttcaggagtaaacccgggagcgtctcctgctttatatttctcaagaacatctagtgtgttttcaatctccatcatacctacttcttctaaccgagtagtaaatcctaacctaacagttttattttctacgtcaactttatcagataatacgtgtgatctacagaggtatcgtctactgaagaaactgttcgtataggaaattccatatacctctttatcgctaagtaagtttttaagtttagttaagctacaatcttttagagtatttccaccaatattcattttaatgttttccctctcttctagttctatatgattttctacttgcttggcttttttgtcctgctgtcctcttcttaaagctgactttacggctaaatgccttttgtggaggcttaggggcggttttcttcttctggaatacaaatataagcatgtttgatttccaaagcctctgcgtacgtatagacagctttccgtacgtatcctttccaaccttaacgtagtacacctcatctaaggaagttaaagtctgatctccagtcttcttcttagctttcaggcggatcatatctgtaggtactcctacgttagctgacactaaatcaataccgtaaacttttctgagttctatatctttctctgtaatcttatcgtaagtctcgatgaactccagtttgtaatgtccctttgtactttgcttcgatttcttataagcatctttaccgttactgtttatgcctgtaagacctcgggcacctcctcctcgtgctatagatcgtgataatgaactctgttttgaatttttactcataatctgtaaccacctgtctgtcttatgtatattatatagcataaaaagaaaaaaggcaacactgtatttaaaataatgtcgcctttataacccatatctatattgtatcatattttttagaaatcctccggttgcatactctctaatgcgttaatagcctgtaaaattttctctttattttgagtcttggtttcgatttctttttctaaacgagtaagttggctgcgtagatcacgtaagatagaggagcgtccttcaatagcgctggtatcttcattagtatcctgagcagaatcaacaacgtagataccttggctaacaacttttcgagcttcttccacaaactcattaaattcttcttcctgtgatgcgtctactttaaatcgactgttcagtgtgtctaacatactccagtgaattagagcagttctagtgtgcccttcaaagtcttcaggattgaatagcttgttgtgtctattctcctgaatgatgtttttgatctggttttcccctctaaaagcgatatatctatcttggctttgtttgacaacataggttctaattgccgctttaactgaagcgtgatcagagtatccttctgtatctctcgtcttagtataatccgccaaagtaatccaataatctcctgcatatcttaccaagttcataatcatggtaataccactcctcctatttaactaaagttcgtctatcgacatttttattatagcactgtgtaaccagtaagtaaacttcctctatttgcctgtgtctttaaaataatggtattttaactgcttatctgggtgcatcctcccttgaatgaaaatatcacatagaagctggttagctgcttcttttcctagtctggacacgatcattttagctaagtcatttttagtaaggtacttcttagaagcgttagacttagtgtacagtccgtgtaagccgttagagcggctctttgctacatctacctttaaccctttctcttccaatgtctgcacctgtttcttaaaactccctaaaatgttcgataactcctctttccacagcatatgataggccatctctactttcttcttaggtgaacgtacaggctctttgtaaacacccagtattgcatcccccctaaactcagtatatgccaagataccaacatgatgatgattatttttacttaatatctcttctgttttttcaacatgattatcatgacacaacacatacacgtagtcacacacaagactgtagttctttagctgcttattgagtctccgggttgtatcgtactcggttttgatctctacgcctattatccctttctcctgagaaaagattagacagtcggctatagtggagcctataacgatacccttttcgaagagtacagtactactatacccgcttgacaaaaatatatgcctctttttcaaaattaattcctttattttgtcttcgtataactttcccatacacatttctccttgttacaagttagttctcctccgggttatacacgcttgacagcgggctgttcttgtcttggttatttccggccagatcatagaagttactcatgtttttatgtttaacaagagcatcaactatagactttgttggaattgtccacttgtcttcccaagtcaccgcggatataccgataaatactccagtattctttcctctaatcagtttacgcttaccatattctacagattctctatccggttcacgctcaaaaaacccagctccccttctgcctgtaatcgaacaagtgtagttagcaactactggagctgtaaacaacggcggatgtgttacccacttcttatttttctttgttgtaacccttttgatcatttttgttaaaattggtgaattaggtggtatagctagaggctcctgaacaaatgaacctgctttcttcaacggtttctcgttagggttgttcactgcgtataccagcacataagatagcccgggttcttcaatacggtccacaatatagataggctcatcgtctattttaagaataccttttctaatgtatgtaagctcactgctttctggttcaataatatcgaactcgttttccattaccaccactccttgtgtttagcaatttttacaatcttaatattaatatagattatataacattccttgaaattataacataagttacagtcttttgtctactgtaatataaaaagaggcactattaaagcgcctccctctcttaaaacgttttagataactttttaacctcttctgctacttctttcttctttttacgtctgccgatatgaattgtaacagatagagcaaataatgtcgccgcatatgcagcagcacctcggagtaatgtcaccccagtcataatagctacccccatcgttactgtttcgttaacgtctaaggctgtaaataatagtaaagttagaaataccgttacagcctctgcaaatgttctaagaaccagtgtaaaaatgttattacctgttagagggtgctggccttgtttttttagctttctagactcacttaacaacgcttctaaatttataacaaaagatataccaaccagcgtgtaacatgcaacagctatagtagttaacatactcattactgtgtgtcctccttatttgttagcataatcggaataaaaataggtgtatcgctaccctctgtaagcactgtaaccatctgagaaggtgaagttgttggtaggttcagctctttactgtaagagttagctcccatggtgcttcctacgtagatatggaatcttgaaaaatcttcctgcacaattctagtggtatgtatatggcctagatataacaaatcaatcggctcatccttgatgtgtttaggaattttaacatcgtctttcttcttctcgtgatccccgtgtttaaccttaacgtttttacctgcaaccttgactgtaaactcgtatgtatctttcctgttgtcaagtagggttacattaggtaaacctccaaagctctcttgaatgaggaacagcatgtctaaaattatgtatgttacagtgtcattataaatcttatcattcttgttcccttggaatctatcatggtttccagaaacaattccaaaggttacatggatacgttgagatagtgtactaaggaggtcagcaatcactctaaccccttttgcaatttgctcacttgccgggaactcagcatcaaatgcttggttcacgttacgcattgagatatgttcgataatgtctccgatatggaatatgtataagtgtttaatatctaggtcttcaataagctgttgaacttgatcaatcacatcttgaatttgaccttttaacttctcaaagtgatatccgcctgtatcctcattgtatactagggacccgatatgccaatccgagaatgctagaataaggctcttgtctcctttagatggtttagggataggtgttcttagatacttagctctaggcattccgctaagttcctttacaatgctctctttaagtccttcaaagagatgctgagtgtataccccctcccgctgaagttttctaagctctctccagtttgcattcattccttccttatctactacataaggagtaatctggtcaaacaaatttgtctctttcaaagagtcatcttctccgagagctgaagggatgtcgtctaatttaataatcctgctgtaggctttaaaaaataaattctctagtgcaggattgctcgagaactcagatataacacgggtaaggtcttgtttcttttgtttcggataccctaaagataccatttgtttgtttacaacagatggaggcattttacctcgttctgcttttaggtaccctagaattgcggctagggcaccttgttcagttccaagtagttctctctcttcttgtgataatttcttattactcaaatacatccactcctatagcttatttgtaattatttaatatatcaatcttgatacttggtaaacgaaaactcacagtctaaatgttctggagagtctggtgttctgacatggtacaccagatcatatcgtttcccggtatccgtcgaaacatacttattgtaaactgttgcatagtacttgcagtaatcggtagagtctactattaaggcaagacttcccgctttgacacactcgtcaatcgtgtggacaactgccccaaaaatcttactactaacactacctgattccccgcaaaaaacccgtaaccgatactcagatgaaagtctactcatgaaaaattcctccctgtcttctattataccataatattcatgtgttccgttgactttggttaagctgtttaacgatggagttacccacaagttcagagtatccaacaccagagaaaacattagctactgtttctttacccgatccttcgttaattaaatatgctatgttacctgcgtgaactcccttagttcgaatagaaaacatgtcgtttgatttagttgatcttccaatacatacgataacagggacagaatccggctccatgttaagtaaatcatttgccagttcatttatgtactcatcagcgaagaccacttttagtacacatggtactccatcaaactcaatgttgtacgcttttgtcgtctctcgttttcttacaatgtaatcattcattttttccatctgtccttgaattacaggagcatactctttgacaacgtcttgaaggcttttccctttaattaaattaggcagccattttcgacttgcgtggtacagggcgtgtagtactcgggttacattattgctactccaagtccatgtacgataagcgttaacggcctcaatcatgagacgtgctttatctgagaaagttacatatttagataacattgtggactcagggtgtagttctatgaacctacaaacatctttaatcgggtccgtgtcttcattcacagtcgataagatatgtttcccttcgatgcgttctccgtatgtactactgtgaataaagtccatgaaaggtacatcagtctcagtgtaaaacccatcaggcagtgcgtaccctttataagcaaatccgagtacaagtattacttctgcgtccttaaacaagtggtaatctcgaaagtcaaggtgacgggtatactgtatatcaagctgtatctgagggtctagaatctcttgtaaaatagctacactggttacaccctcaaaagtctccggcacaaaagcccgtacccttggtttatcctccattgtctccctcctttatagcagagttattccctgtagttacattctatcaggtataacattgatcgtcaacaaaaatattaaaaatatttcagggtttttacacaaaaaaaaagaagagaccgaagtcccttcttctatgtaggttataacattaagaagcaggttctgttttagtcataatgtaactcattggagactctccaaagctgttgacagccgtaacattgattgacaagttcgtattagctgcgatgtcttctactaagcagctaggttccgtaacttctttatagaatactttctcagcacctctataaaccttataagagtcagcttccggtactgcgtcccatgttactgtcactgagtctgaagtactagtgtactttaagttttttggtgcagaaggtacgttagtatcgtagtcttcaccttcaagacggaagtcattaacacccattgagtactggctgttagcaaactccaagaaagcaataagaatttgacgtgcttcttctcccgcagggatgtcttttacttcatgagctcctgtattgtggtaaccgtctctgaaatgtggatcattcttaggcgtgatatacacgagtttgtctccagactgagaaacaactgggttcttttcatctggtacaaaagactgaccgtcctcagaaagaactagaggtacaacgtcaaaagcgttgtctcctttagatacgattttaaagtggtactttcccaaatgcaagttctgagtttctccctttgtagggaagaaacctacggattctgtgttggctacaagatagtctccgtcattcagagtaactgtatcttgagctaaaacatctgaaattttcatagtgtggtttactcctctcgtatgaattagtctactttaatttgcttggatacttctgctttaatacgggcttttttagtaacatcgttgtttttccagtaagcatggataaagctccctaccatgaatacaagagaaaccccttgataaatgaactcataatcagcgtcaatattgaaattgaaaccgagggatgctgcggcagcgttcacgatagcaataaggtagatgatagtagtcacaactagtttaggaccaactttaggcgcttcagtaggcacctctacaacttttgcttttacttttttgttttcagccattatttttcccgtcctttcttaaatattgtcctttataatatagcacttagtcatcctttagagcttcttctaatcgtgttttaataaacatctggacattcttgatcgcatctcggatatcattagaactaaccctctcattacggtgattagcttttactttcttttcaatctgcccgtctgtcatctcctgaaggatgtagtagagtacttctttatctaggtcagagaatcttacatcttggagagtgtattctaatacttcatagtaatcaagctcttcatcagtcatgctgcttttctctaaaagattggtgatatcgaaatcattcttaggaataaaaaccctcttccgatctcgatgttcaccttttatgtatgaatgtttaactcggtaattcagtttagtcttgatatacccggggaaatcaacgggaccatttatgtcgtattcctttactaatctgacaaactgttcatctatgtagcttttaagctcttcctgtgaaatagggtcagggagacgatctttgtagaggttaaaaacacttaatctgaggttcttatactggtgcataagcttatcaacgtccctcagaaaaacccctttactttcgtttgtgtttaccataaatcgtgtaccgttgagaatctgctcttgctctttttcaacatctcttgtcaaagggattctccccctccgtgatgactttaattttcatcttatcgcaataaatgtcagagtaatgaatagtgtatggtactttaacttcttgcccgtctagataacaaatggatttacccatagcccatctgtcatgaacgtattcgaagcgcacaatcactgtctgaacactgtacgagtctttaacatcaataagaactcgtttaccctcatcaatggtcttttgcaacttctttttaatttcctgataaggtgttggaactttcgtgtcattgcttcttgttctctctcgatagtattcgagagtagaagcgatgatatctcccggtgagtctttcatcacatttaccccgccttcctgttataataaagtgaggtaggggattaccctatctcacctgtaatctcgttctgaacatcagcgatcaaatcttctgcaccacttgaatcagtggaaactttggaaacttcattagaagtagcaacggcttcttgtggagttactttatcgatccaccctgaaatatcaagagtttcgttattaaatataggatatgtaccttccgggtattccagctctaccagtttattaagaatttcttcccgcacatgttgtccttccggtgtccgcagccactcaataaagttatctttcttcattttatgtagttcaccattacgatctacgtactcataactgtgacctttgacaggaagtactccatcttcctcagccattttagccaagttatactcataatctagtccgttatctgagataaggaaagcttgcgcctcttggaaaggcctagacaccttagacttattaactttaataacgaggttatgcccgatcttgtccgtacctttcttaataggttttgacgctctaacaactaatcgaagacttgcataatgctcccaagccttaccacccggtaccttatctacggcaaacataggatttcctccgatgtcatcccgaacttggttaataccaattagcatagccttagcctctgtaatcattggagcgacttttgttacaaactgagtgatagcttttgctcgggagcctacgttcttatctccgaagtctttgtctaactcatcttgacttggcgtgatacctactgagtcccaaacgaatactaccggaactcccggatactttttagtaaacaattcgagacattgctctacagttctaccaatctcttctactgttaaactaataccagacgaaggatcaggctgcttaacaagaatcttactaacatcaattcctaagtgagctaaacgttcccggtctgctgtaccttctacgtcaataagtacgacaatacatcccaaactagtagcgaccctagatacatggaaagctaaagtagattttcctccccccggcttacctgctacttcaatcatacgaccaaaaggaagtccgccaccaaatactttatctactcgtggtagaaaagtaggtaaacggtcttttactaaagcgtaatcagagtctctaagaagtgtaagtcctgcatcatctgctagtgaagaaagatcaatgtctacagcaactggtctattctgtttttttcttgccaaattagttccctccgtttgttttacatatttgaaggaggtagcctagtattgtactaaactaccacctctaactttgattagttgccgtttagttgctcgtcaagcatactttcgatatccaaaagaccgttattattaacatctacgttgtgtgtaggtacggtgtcttggttcggtgaagcgggagccgtattaactgttggctgcgtaggtgctgctggagcaacatctggtactggaggtgttgcgttgttctcagtcactgttggtgttgttgcataagggtttaaatctgcgcccgtactacctacgtccggagtaacaccaaaatcagttggaagtgggtctgtaactagaccttctgctgggggagttcctgtaggtatattccctgcctgaaactgattttgttgtggttgtggctgactaggcggttgcggttgctgctgttgcatacctgttggcattgtaatactaggttgttgttgagcagcaaacatgttaggttgttgcatatatgtactttgttgctgttgttgttgtacattaatttgtggctgttgttgagcataagggttagccatcgtagaactacccatttccacaggagcttcttgagattgactgttaccttgattaggtttacgaccttccttcatatcaatgaaagcttggacccatttgtctccgttttccaaacgctctgtaggtactgcgttagcacgtaagtcttctagtttagtttcccatccagctccagaaggtgggagtgtaacgttggtgtacacatcaaccccgtactccatagaacctttaggaggcttagaaattttaacaagtctaggttggtttacatccatgaaagacagctcacttgtaccttctgggcgatatagagggtctgtcaaaagattaataatttttttatgagctgaataaggcatttcaaaaatacgaatgactaaattaccctgctcatctctctcttgaaagaactttcctgaactttgatcttggaaaacttgaacaacgttgtacaagaaaaccattcttggagactgttgtcctccgaaaccattcggaatcaaccctttaccgctccattcagcaattttttgttctagcaaggagccggggttttcctgagcgtccagagtaaagttactgttaatttgttttccttgagaggaaacagcggtcaagaagatttttctaataggtacaaaaaactcactttgtaaatctgcactaggcataatctgaattagcttagcagtctctcctttagcaaagaataaaggtttttgctttctctcagggtactttaccctatcgttttcccctcctccgttatttgcaatcttctgtgcttcttgattaagaatatccatgaatgacatatgtataatctcctcctaatttttttttagttactttaacattataacatagtctgtaacttaaatcaatagttttaaacaagttttatattctaatgagttaatatcacttatacctagtgatcgagatttagttactactttatctagctgtctatcactagaggtatccacttgccaaggccgatcttctctttctcctattctaacccaacgattgtatgcgtctgcagtgcctagttgctctgctccgcacgtgtaatccaaccttaacttaaatggttgtttactcattatttcatctccttatgtttaaataaaatcttgatcggacacgatattcggttcctctacatagtatctagtatcacaatcctgacagtgaaattgcatgtcagtgaggtcctcaacataaaactcgttagctggtccgcctcctactaagagtatagagtttaccagaactcctccacagtcggggcaaaacatctttatgtattttgcctctccttttatcctatttaccacttactcacctccttaaagtgctatttgactaaaggtggggagttttctatgcgagttcctgccccttgtccatacactttgttttctgcaatctgcttaccataagactgtaacatatctttcctctgttcaaaagccttcacaatacgttggacacgacccactatgtacttgtagtaaatctctttgtctttagctgctttatacttatcagttctttttatgtaagagtctacactgtctttggtgggtttctcccccatagattttatgtgttctcgtgcttcattgtcgagtgaggctacaaccctctctaactctaactctacactttcttggaagtactttaatttttccagaacagatgaccagtatatgtacttcgaaggctggtgtaacatttctaccatgaggttatcttcattaatcgtcagctcttcttttaacttatgttcgacccatgttccatcttcttcaactaatcttagaacatcaaaatctaaactgccaatgttaatatccaactatttatcacctcgcttatgtcgaaaacaaggaagaggtagaggctttatcctgctgcctcctccctgtaactacatcttactataacctattctgtatgtcaactgtaatttacaaacttttttcagtttttatcctgcattttgatatacgtcctttttgctttcaacagcatgcttgagctcttcatacttctcttccgtaataacattagagttcttgtagttcttgatgttcttcaggtccaaatgatatttacagtagttcttaacacagcggaatgtattgatatcttccatgttatagtctaccatgtcattgtagttaaccccaatctctacatcagcagcgattggataacggagttttccgcctttccaatcaatgaacaaccaatcaattggcaagttctccatgatgtgcttagctgctttagccatgatgtgaatttcttctggaggacagtcgagtacaatggagtcatggactgtaagaattactctagaacggaaattgttccgctcaataaagttcataatatgtactacagaagagttagtaagaaacgcaccagacccctgaattttagtgtttactgactgacgaagtgctgcgttacgtttagatgagtcacgagagtatacgtcttgcagatttcgtctaaatccatgcaaacattcaacgaacccttcttttttaacctgttcgtgtacatcatcaataaattgtttaattcgaggtttattcctgaagaagtcgtcaaataacttttcagcttgctcaagagtcatcccgtgcttagcatagtaactgaaaggtgtctccccataagcgatgccgaaggttgttgattttgcatcagaccgcatatcatctgtaacttgttcaataggaacattaaacaccaaagaggctgtatctttatgcacgtcagccccgtcaaggaaggcctgtgtcatttcttcatcctgagcagctaatgcaagtacacgagattctagagaactgtagtcgagctgtagaagtgctccaccttcaaagcttgtaacaaacatacgtttaattggatgcttgtagtcaaaccgagttacatcccctgtctttcttggcatttgttgtagattcctgtataccgtctctttcgagatactttaacactggctgtaccagtcggagtagactatatcttgctatgtacacagactatacacagcccgtttacataactctcggcactaatgattgattattgctttgcctagctcacaatctagtcgttgaaccttcctcatacttattggcatttcagaggcttggctgcagattatccaatctccattctttttaccttacctgagtagttagttcagccactatatctgtttccagtatagcttggtaaatggagctctaaggacgtccccgcaattcaccgagataccccaattctactcagggctctgtgatgaaagacgtgtcgtagcggttcccgttaaattgaatcccccatgaagtaatccgttatgatcgaccatgttcaacagtttatatgtaaagttctgcttccgtgtcttaacaagggagtgtgttaaaagcaagttagccagttccgcagactcttcgaagttctctgctacatagtttaaagccgctttattagccctatagtgaaaccattgaacttcatcctccggaataccgtcttcaaaagcagaatccgttaaaaactctttattatacggaagcctgttacctgtgtattcatataacactttctgcttatctactgaggcgttcgggttaaatacaagcttatctttatatcggtctcttaacttagcaatctcttcatttcgatctgcttttggttttagcatctcctccataccacgttgatagagggttctgtattcctcttcaagtcgttgtacttccggaaatttacgcatctcttcgagcagcctgttttcttcttcctcatatttagtaacaagaccttttgtatactcagtatccatcttaacaccgtttgcttcaatcttagctagcgctactgtcagctcaggatacgcctttgtatagagctctctaattctagcattttcttctttccgccctactgcgtctaatttattgtatatccgtaagcaagcgtcagtatctccagaagcataagggtgtaacatagactttagcggaatccactcgtaactgaagtcgcttccgtctacctcattaacaggtgcgtcagtagaaggaaactctggtttttctggaagaactggtggacgtttttcttgtttagcctgctgtttttctagagctactgcttctttatactcttgtttcattcttgctttttcttccttagacttttgaattgcttctttaacatactgctttttaaattcctctagcggcttatcataaccacccatatcagtcatttcataacttagatcactcaattttaatgaggactctacatcctgattaacgagcagatagtacataacctttgtatctcggtggttcttaaactcagtaaaccctttaacaagtcggaggaaccgaatatcgtattgcactgaaaccctaatctttcgatcaggagcggactataccttcacaagcccgtaccaataggtttgttcgcagttacctatatggacctgtgcccctcatttaagtggtgttcatttggagtcacgttacaccacttctcactttgccctgcgaaggctcagctcagtctctacaccccatctactgtcaccagtaatgtaggcacggtgttggcatatctttcgacttagctttcaccgttatgagaggggttttataacacccattttgttaaatgttatgaccaacttttacaatatcgggatttccaacaaactcttttataagttcatatatctctgctagttgcccgggaagccaagtaaaatctttatgctctagtggaatagtacaaccctgaccttctttccaactcaaggaaataactaagggtttggctcctttaaactctggccgtaatgtgttcgtctccaagtcccaagctacaattggtgctttagggatatcttctttaaaaatttcccgtacacgctcaatgctgtctacaaactcatagtctacaggagaggcttcaaaagcagcttcaccttgttcaatgaatttctgtagtgttataaagtcagcttcaattaaattccggatgttaggctggactagcatatactcaatactatatgtaggtaacacccaaacttcatgacttccggatgaagaagaactttgcgcttgatctactgcatcctttagtctctggtagtcctttagcaacgcttgatccttttcaatacggtccatcggataaagctgcaaaaaggaatttagctgctcttctaaatgtttaacttcatcagaccttcccgcatcttcagggttaggttgattatttgaggttattgtaactttttgaggtactcctctttgttttgaaatagacgctactccaagaagcgccttacatcctaagttacctgtagggataataatgtccggtttctcttttacgatcttgtcatacagtacctcaaattcaggtttagcttctttttgtgttggctgtttgtacttaattgccctgttaaacttatctcgcttaataactttaggaattaagccataagcatagtctacgtaataatcatttctggttaactttagaccgtcctcaattaatccctttaaaattttacctgcttctgtctgaaaaaagacattaacaaaactgtcatctttctttttcatgtggttttcacgaacatgttccaataaaaaaagtactttcaatatttattccccctctataatcttcactaggttgttgtctactaagtagctaacactttgctcagaaacacgaaagatttctcctactttatgttcttcaacccagtacccgaatggacggagcaccttaacctagacttggttatctgttggtccgctatccataaacaccccaatatccactataacaacctcctcactactcatagaggatcaatgatgtctccaaaaacctctccaagggtatctttaataagctcttttgcctcttccaatgcttgctttcttgctttattttctcggtataattgagaataagcctcacggactcttgtagaatgctgttcatcacttctcaaatttacagatttagtgatatttgtattcaactctcttaggacgttgtcggttagacggatacgctcctgaataagaattagcagatcgctaactttctcttcaagtccttcgtcctttaccttgtaatcctttgtaacaatggcgtatgcaaggtcctctcgaggtatttgattgagataataagacccgtctacatgccaatcctcatagtctccatgatagagataaacatcttctagagccctatctgtagtatcttttaaatccaaaaaatctctaagcgccttcgcctgttttgcagtcagaagaactgtcactttaaatcccctcctcttttccttggttataatcatactataacatactctgtatgtcaacacgaaaaaagaggagttttatgatcactcctctttttcctcactatgtactggaagttctatgtctgataatctagttagcatcttaaattttggaactttttttgctgggcgaataaaatattttttgtttagaccgtcaaatgctttcttttcaggcaattcttgaagtaagattttaaagagtttaccttgcttaacttcctccccattcattagagcttctaccacgatgtcttcatacagctccaatactctctctacatctccaatgttgtatcctcctctgtgagcaatgcgtctagcctgctctttacgatttactgtcaatatcataacctccctgagatgaggtcttactgccagccttcttgaaacgtttattatccctaataaccatagactctactcttttcatatctttcctagagtcacatactagccaaatattcattttccatgtggaaagcggctcttgaataaacctaaagcaatcgtacttatacttagattttaaatgatacataccgttataatacacatagtactttttgtgtcgtttttgaatttcatcttccctcagtgccgggaaagaaatctttactttatctacatggtaacgcaacgggtatagtgaaaacaggtaatcataagggttaatatccgggagaacaataggaacgtcaacagacacctgtgtagccttagatactagctgcacgttctttacatcctcaactgtatactccttcttacaattgtagacaacctctgactgaggtacactggctaacttactgatgattggcataggaactcgatccggcgtgtaataaaagatacggccaccatggtcaaatactttttcctgtacggtatcgtctgcgtacttgtgtttgtagagaagatacttcttactattccgtttattgaatcgagaggatgtctttttaagcgcatccatctccctctctacttccttttcgtttaactttgtaaccttaataaattcactttctttttgctttgtagttagattcagattaaatacccgatctgtattatgtatattaagcgttcgttttctactcatctctttcctctccaaatattcatttattttttttttaactctatatctttattataacataaaataaaaaagtagaggcattaagaaacacctctacttagttaataaaatcctctatttccttagtttttaaaaagcggctgtaacggttttttaacttattagcaaatgcagctacctgtggtactgtggcttgagtgtattcgaagcttataacctcccctgtttggatgtccactgtggcactaaacacctcatcaggtgtagtaagaataaaatttcctccatcaattgttaactctgttttcactaatcatcaacccctagtcttttaaactgtcaatcaagaaccatacccatttgtcttcgatgttatcctgcattacaccatagcatttatccggaaaaacaataacagggatggtatcatcgcactcaaagtataatatgctatctaacacagacctagcagaccaccctaagtgtcgataaactacttcataaagttcagaatagccattactttggattatttgtgttcgatactcattaaagaccactttatcaaattgctccccaaggtataacaacactttattcttagcccttgtcatttcaacgtccacagactgacgcctcctccatatgcctccatagctcttcccctgaaggtctatactttagttcatgagtctctgtgtcaactaagaagaatacattaaaaccattttgatccaacatcttgaatgagtggtgtctcggataagaaaaatcagtatcaatcgaatagtctgtataacctctaatttgaagattctttaaagtcaacgtcaaccaatcgggtatcataatcgttctcctttgtgattttattatagtttaaagtagataggtacatccttgccgagcaaactgcatatctcctgtattccctataaaatcctccatatcatccccatagtgcataagcattacccgccgttggactgtctcaggaataccttcaagcaactcttccaaactagcgtgaactcctcctgtgtataactggcaatcatggaaaatccgttcatacctgttagaggtagcaaacgctatcaaatccttgtcaaacaccgtatctgaagtgtagagtacctttcgctctcccctctcaccgagacctactgcataacttttcatgccttgaacatggttcgttttaatcaaatcaattgaactactgtcccctcgtcttatttgatctccccatgaaggatcaagcactaaacgaatattaaagtagtcagataaagataaatttttatcacccccatacttcaatcctccttttaaactctcttcccacaaggactctacgatttcttcatgaacaaataaatccatttttctgttattgaggacaaatttgttataaagggctgcttcctccaaacctccgatgtggtccgcatgagtatgagtaattaatataccgtcgattgactcccatggaatcctcttatctgcaagacctttaggtactgagtgtccacaatcaattaataagttgtatccgctgtagaaagtaaccaatgcactgttattataaaatctttttgagaacgctgatcctgttccgatcatggttatctccattaaatctcctcctgtattatataagatagttacagtctaccatactgtaccaaagtttgtcaacaaaaaaaaaaggtgcaaaatgcacctttaactcttgcttagcatgtcgctaatctcgtccggcttaaaccctacagacctttggacttcattgccgttgtcatccaatagaataagaacagggacactcatgacaccatactctgctgctacttccggattatcttctacgttaactttgtcataagaaacaccctcatcaaccaaaaagttctctacaagttcacagcctgtgcaattatgtttttcaagttttactagcttcatttagttttcctccgatttcttctttttataattagattccttaattaacttaaacgtccacccgttatagtcttctcgttccccccggagacataggcttatgtgggaacggtttagcccatattttttagcaaaaggtcgaagacctcttacataaatcacttcaccctccggagatgtggcaataaaacggtgactggcattagttaagtctctatttgcattattaatatgtctactaacaaaacagcaagtatcaggtgagtacacctttttatttttagggatgtttttctgttttatgtctttatcaataaaaatcttactttgtttaaagagctcttcatcgtaaccttcaatattcgataagtcctctaaaaagttttcaaaagagtgccagcggtcacagactgtaaccccggcacctccgtagtccttatatctttcacaggaggagtcatagcatctctccaacataccgctccacacggtatactctctcttatgatccaccatcttaacatctccgaggtagccgatcccaaatactgatctctcataacgatctttaattttacctcttttaatctctactttttcaacatctctctcgtaccctgtagcaataaatcgtattctaaaaagttttgtgctattacttttctttccactaacatataaaacttgatattcttgtccgttattattacagaacgtcctacctatcaactcatcttcaatcgccataatagaaatccacatccctcagaggctcaactatagctttcttgtatccatttcccttcaaactgaagaagtcaaaggatttcgtctttgtacttaaaccattcaatacaataggattaacttcttcctcatcaaagtaagtatcgaacccaaggttcataagtgctttatttgcgttgtatcgcacaaactttttaacatcatgagctaaaccaacttctgcataaacgtcctcagtatactcgatttcattcttatacagcttctcaagaaggcttatagcaaacatctctaatcgatgcttttctccttcgctttgcttattgtaaatctcctgagcaagaagccctacgtacactccatgaatagcttcgtctctaattatgagattgatgatctctccagactgcatcaatttaccttgtccgtagaagtacaatgggtagtagaacccgctgtagaataggaagctctcaaggaatacagaggctaccatagctttatatagtgaaatatcatcaccttttttaatgtctttgtaaatggatacaatagtgtctgcctttttctgaagatacttattttctttaacccattcaaatacttcattaatttgttctgtaggggcaagggtgagaaagatgttactatacgatttagcatgaacagcgttttccatcatagccataaagtttagtacggccttccgttgatggccttctacatgttcagcaatgtttggcatacctgtgttaccttgttcagtatctaaaagggttaaccctgcaagatttctcatatacgctctttgttctttatctcctaagttcttccacgtaagtaaatctccgtttaaagcaatttcttccggtaaccaaaattgcttgacattttgttcataaaacatctgtgtaaagttatcgtctggtttagaccagtctgctgcggtgtaaataaatttgtttgtcaatgcttattcctcctctttatccggtacagtataacagaggaagcatagtgccaacaaaggcactacactcccggtaaatcctattgcaaaagctactgaagaaagtaacgctattgtaactagggcttttattgtacgtttactcatatttcttcctcttagtgcctaaagcttgaagtgctttactatagtctccgctagtttctttcatcattacttctttccacgcatctagggatacgatggtaaagtcacagctatctttgtcgtacatttcacaggtgacaacataatctacaaatagctctttcatataatcgagatcacctgtcccataaggcttaccgttaagaaaacatttatatagtttgctatcctccatacatgcctccttattctttatggagtcctctcactctcttttttaacaaccattatgttttggataacctctcaagggcttcccagttattttttatagactcttttataagcgcctctcttttaatatcattttctttacgagtcttttcaacattggttatactacgcatgataagcagctctcttgtgtagtgtcttttgtacgagcataatacagagtcttaatacctttgtgatgtgcatataaatcaatccggttcaagtctctagttgtcatcgtgtcttttaagaacagtgtaaagctaataccttgatcgatatgctgctgaatagtagcgatcatgtctacaaccttgaacatatccatgtcatatgcttctttaaagaagaaccagttactttcggatagacccggcataggatagtatgttttactatttccgtatgtacgttcctcgattctctccataataggcattacagaagccgtactagactgtacataagaaatagaacctgtaggagcaatacaaagtcggtagctgtgatacaaaccgctgttcataactcgattttttaacctagcccagtcttcttttgtagggagttcaataccctcaaaaagagctttaaccttatcagatttaggtaggaaatcattatcaaggtatttatcaaagtactctccagaagcgtacgtagacccttcaaaaccggtatatgtccttcctctttccacagcaatttcatttgaacgggacaatgagtggaagttaacagcagcgaagaatacatcggcaaactcccgagctgtttcactctcataagcaataccgttctgagctaaatacccatgtaggttcatagcccctagtccgattgattgcatttctttgtttcctttgttaacggctggagcatttttgatcgctgttgtttccgctacttttgttaaagaatctgtagcaagatcgacagctttcttaatagatttgttctccatcacatttaggatgttcaatgaaccaaggttacaagaaatatcaagaccaatatcatctggctctccgtaatcaccaaaagatgaaacctgggatgcttggagtacttcagtacacaagttagagaacttaactttagagatatggttgttagcatgttcattatttacattgtcttggaacatgatgtaagggtacccggactcataacgaagcattgccatcttttctaaaagcttacgagcgttcataggctctttccttacatctgggttatctacaagttcttcgtacatctcgttcatatccatctcatccatgtgctttccataggctttataaactgtgtgaggatagaataagtacacatctttatcttctctagcgagctcaataaacttatcagggatgactactccaatagacagagttttgactcgtacatcttcatctgcggatattttctttgtgtctaagaagtcgcttatatctctgtggaagatgttcaaataagccgctccagaaccttgtctttgcagactattcagacgtgttcgctacgcacgtcccgcctttcggccgcttcatgttaccatgaagattagactatatcttcatcccgaaggatgcctcccatttcgactaccaatcgcttgtagcctacgcctttcggctagtcgttgaacgttcctcaaataaaatgaggcttcgctgctgattgtcccgtagggagttcccagcaattaaagaggtttttcaatcgccattactgacgaaaggggccaactcaacccatctggtctgcataacggaaagcattatcgaacagcttcataacgcctacaacaccctttgtagcgttctctacgcctttaatggcctcacccttagcacgaatcttagaaaggtttaacgcaacccctccaccaagtttagagagctgcatggacatatctaatgctctagagatgtcatttagagagtcattgacctccatcaggaagcagctaacgagctcacctctacgtttacgtccagcattaaggaatgttggtgtacttggttggtattcttgattgatcattagttcaacaaactcttttgctttctttacgtccccgtctgcaaagaacagagctacaacagagattctatcttcatatcgctcaagaattttcttcttgtcgtttgttttcaacgcatagtcgttataaaatttgaatgcgctcatgaaagaagggaacctaaacttcttagcataagctgtttggaatacttctttaatctcttcaaatgagtactttgataaaaattcttcttcgtaatagtcattcttgattaaataatcaatcttctccttcaagctgtggaagaaaactgtattctggtttacatagtcaataaaataacgatgaactgcctctttatctttttcgaactgaaactttccgtctttctgtagcataatctcattgtttagctgaatccagctaggaatattacttgtcaattttctctacctcctgcataaacctttctatatctgttggtgtaccgcttagttcaatcttgaggagtaagggtacattatataaacttgatagcttatcgcctgctgcgccgaagaactctccccagttccgatttccactcgacacaacgccttttaagtattttttattgttctctatgaacttagatgtctttggcggtacctgcccgaatcctacggtataagtgatatgtacaaacggttcgtttacctctaacccttcgtgtatctctttaacctctacgttatgcaatttttttagttttgtgacaaaccgcctaacattgcctgttagactttcgtatgtgattagcacttttgttcatcctccatgaaactaactcctctctatctttcgtagttaattttttaagctgttataaactcagtgtaacacataatatagtatttgtacagtctaaaaattcataaaaaccccctacatatagtgtttttataactatattgtaggggaaaaattttttatgtatttccgtaattatttatattcatctgcgtaagggtcccagtcctttacaagctccgaatattccctcatctgttgaggaggtattctcttgatattatccattgtggtaacaataacatcaaatttttgtacctcttctctaatgtttttaatagttacagtcgttctcatcacatcatgatggttaacgtctaagaggccataaaaagattctgcgtaaggaatcattacaaagtcctttgctctgtttctagaaaatattagcatagggacttttttaactcgtctagcatcattcactacttgagcccaccactcttttggttggctgatatctagtagaatgtggtccattgtccattcttcccgctttttacactcaataacaaaggggaaatctaaaccttgaggaggtacaatgtctcctgctactcgactatctgctccccagtttaatcctcctgaagcaggcacccggtggaagtctccccgccaccaaagggacatgagcttagcaattttaagctcatatgccgaacctttagtttttgactttttacccattactcctcctccttcattttttcctttgcttcttcctgtttctctttaacttcctcctgttctttcactttctcctcaatagcttgatagtactcagcttctgcctcattgaacattttatcagtggctcctagttttttaagaacagcttcttgaatcataagggtgtccaaaactttctccatcaggaagtcttgttgttgattaagtgctttaaaaagaagggtaacatcgctcatagttgcgacacgtcttgagagacgtttgatcttcttagcgtgttgagaatcctttacatcttgtaacacaacaaatctaaagtaatcttgtaagtcctgctttgagatagggtcttggcttttaatgtttgtcattttcatcttctccttttgtatcttcatttagtaaatcatcttcatgttcttcaaatttgattttaatagcgtttttagtatcttccggtagagcgttaataattgctctaattcgctcttcttgtagttcttgagaggctccaaccattccatctacaatctcttccactgcatttagatgatcctgaatcaaagctataagtccaactcctacttcagatagggttacatactcattagaagcatctttaattacactctctaactcttctgttttaccttctgcctgaagaaagacgaccttctccataaagttccaaagtgtattcttattttcactcatgggtatcatccttcaaggtattaccagaacttccaaaccctctttcttgccgtactgactcaggtagaacgcctgtctctttaaactctgccacaatcttaggaatgaacgacatctgtgctactctgtcatgctttgctatgtatacagttcctctaggtacaagggttctataagctgcttcatttacagccttagcttctttagaagtaggttctgcgtacccgagtaattcggtttctgcatcataaaaccgcctagcctcttgtaaaaccttttgaggtactttactaataggtagccgctctcctttagttgtaataacaaagtctactagactgttatcaataaatgtgttacgcaggagaataccaataccatcacgatatgtgccttctacgatacccggagagttagaaacaatcaaaggtgttttactagcgcatccactacgaagggaaataaacattcctgcttcgatcgggtcaaatgcagtttttaaattcgtaggaacaggcacagacctaaaagtcagtggaggtactaacctgccctcggaggcgtacatgtcgaatgcaaagtccccttcataaccttgggtaggcttcactgctcctttttctttcttatacagcacttcaagctttttcaaaaatttttcctccttatgttataacttaattatatcatatagtgtaccacacttatgttacagagtcaactcttttatactgagttcattaatgttaatcgaagctccccttgactatcagccgggaaagcgtttctcagcagttcctgacacttttcaaaccctaaatcgttggcatcttcatctagaccgctatagacaaagtacacttccctgtccggttccatctgctttatcatacgtgcagaatcgatcatatccttccaagcatctgtatcaagaaaaatatatataggtaattttctttcccgggtctctcttagtaaaagttcaacctgaccctctgtaatcatcttaccaaatgtggcgacacctgaatccggggtcataaaactgttaaacaccccttcatgaatgatgatcttatctgtgtgttttgcgttgtttaagttaaagatcgtgttcttcttagaatattctccttctcgactaggagcgttgaacgacttaatgaaagggttaagttcaatactacgagtattccagtaaacaggcttccctgtactatcatgagtaaagaagactacgtgattggaaagtctgagtgtttttccatttataagtgatacctctccatctgtcacatacgaaatgttgtgtcgctttatattgtccagcgtaactcctcgtctatgtaaataagtgaagaaaggaaatgcttctgggttgttaaagttagccataagaggcttacagttggtagggggaggaggacatactaacttctcctccttatcctcctctaacggtcttccttctctactgatgaatagtagcagttgttcttccttagttagtccagacccaaactgttcagtattaaaccccctctctttctctgagtaggcgtcatagtcgaatgtggctagaatgtccgctgcttctggaaaggacacattgtagtactcctttacaaaagaaacagggtttcctttctctttacatctatgacacgtccataagcctttttcttcatgtacatagaatctgtatttagtttccccacaaaacggacaacaaaatcttatctcgcctgctgctgtcttgtactcccctaattcctgttgtaataaatccagaaacatagtctaacctcctatcttatatcgctcttctttttgcaatcttgttcattgtaactaacatactatacatttccccaaactcaaggtacgctttctcatgaattgtagacatgctttcaaacatcttacgctcccactcttcgtctaactcggttacaggagcattagttacttcttggtgcatcttgtagttcttctcgatatctttttttacaagactcattaagtactgtagccgcaagaacccttttgcaatatctctgctgttgtatgtatcatcagtaattacaggtaaatttagttgcttagccttttcaattatgtatgtatttctttcgtatactttctgattaaggaagaaaccatctttctttttcaacggttcagcttctttaatagtacttggagcgttataaaaattagggcccttataccctcgctccttaaccagaactaatcctcccttagaatctgaaaacttgtatgaaaaattaatgttgaaagggtaccagtaatgtagattctctaaaggcatggctacaaatgtctcccccgttcgattcacgctaacccgcagaataacgtcatccccggcgcccctttcatgttgtgtttttactaatagtttcatttctctactcctccgcttattgtggatactccatctttatttttagttactgttactgttttatcaaatagtggttttaaatgttcactatgggaaataacaaatattgtccctacagtgttaagtctttctttaagaagtgttactacgttttcactacctacactgtctaacgcatcgaatacttcatcgtatactacaaagttcgtagttgactctgatcgactcattacgaggtcctgaagggctaaagacactgctaagtctaccctcttcttctctccctctgaatttgctctgtagctttctcctccggaatggttgatcaactgaagatcaaatttatccgataaggacccgtctttattttttgtttgtgtactaaacttaatctccatgtctgatccagatagagcggacaagtatttgtttgctctctcgtttaggaatggtgttactaagtccagaacatgagattttacaccagagtttgaaaacactttaacgacatcttccagccgggtcttttctttctccagattcaaaagttcctgcttatgactttttattttccctctaatggcttctctctcctcatcccttgattttggttgaggaatgcttctgagcttctgaagagtggttttcaagttgtctagctgattcctgtaagaagccattgtattttcatagttagtgatctgctgctggcagttattaatctcatccataatctttttgtactcttgattatgtgtgtcataaaccgcttttacttgctggtactcttgaactgctacagtatattgatctttaagacttgtaatctcttggtcaattttattaaactcgatgagcacgcctttcaattgctcccttatggacagtagctctttttctctatgagcgttgtctaactcatttccacagacaggacaatgggtgtccttttctactttcttatactgactaaccagttcagtctttttactgttatatgtatttaactgcgcctgcttattttgcagtatctggttaatttcgtttaccttacttagttcctgatcaattgagacatttgtgtgcttatctcgttgactttctagcagcttaattctttcccgaataccttcgacaatcgggaagttagctgcggcgtatctttccgatgtcacgagcaagtcatcaaaccgtttctcttcctgtttaataaggtttaatgtgttttcatagttgtctctatcttgctgctccagagtatctacctgagaaagttcccactgtaatctttcaccttcggcttttttatttcggatttcttcatctttagctctgactcgttccttagcaacttcttgagctgtaacgtatacctgaaggttgactaagttctctaaaatttctttcttttctttatctgtggcaattgcaaaccttccagctccattaccttgggaaaacattatgctgttaatgaacgtgttgtagtcaatacctacaattctttcaatggccttatttgtttctgcggtagatttttctgtgatctcttgaccgttgacaaagagaagtactttgttcttatgtttactatgcttcctgtacctctcgattcgataaaggtcttctcctctgtaaccttcaaggattaccgctgtattctttcctgctgttcggttgattacatcgttagctttaatccctttggatgttgtgtcgtagatagcatacactaaagcttccagcaaagaactcttccctgatccattactttggaacttgctgtttgtttcgttcttcccctcaataagaatgatgcccctattatcgagctctatttcggcctctttaaaagagaggaagttctgaatggttagttttgtccatctcatttatgattattaacctccttatacaagtgtatatctttcctataatcacagtataacagagtctatatctattgtcaacagcaaaaaaggctatccagtaaatgaatagccttggtgattacgcttgtattcctctagcttcccttaacacgtctagtgcaatgtctgtaacattaggatagaactcttttgtatacgactccacaatctgttcttctgaggattccatagatatatcaatacgtgtttcaacttgaaaagtcttctggacttctactcgaacgttgtcactctcttctttaaatatctctacctcttgtgctttttctttagggagaataaatcttacatagttgttatctacgatttcttgtgtattctcatcgatatcagttagtgtaataaactttttatttggaataggtataaactcaggtttgccccccttctcaaagtcgatcaagaatacgcctttatcttgaccttcatcagagaagctggtttgaattgtgttccctgtgtagaagacgttatctgtacctccaaggaactgtctcttatgatagtgccccaacgctacataatcgaatacatcagggtacaagtcacctagcttaaaagcgccttccaatctgtgactgtatcttcctgtttcactaccgtctacaccgatatgtccggctaagagcgtaggttcactcctatctttagcatcctctgcaaactctgcaatcttttttttcagaaattcaacgtcatccgagtatgggacagtgtaaaggaaaaatgtttcaaaatagtagtcatccgcctgcgggcagacatatgtaatttctggcgtagaactaactttaacatgtggcaggtactcaaaagtttccagccagtgattagggtttgtcgtgttatttttcgaatcatgattacctctaactaaataagtggggacatcgctattttgtgcaaagaccttataaacattattaaacacaacatcctctagtgtacttcgtttatggaataagtctcccccgaaaataaggggagctttatgttgtcttgcaatatcaaatactttatgtaatgtctcaatctgagctctaaacctatcgttcacaaattcaggatcaggcttagcaaaatcatcgaaaatatgggcatgaaaatcggtaaagtgtactgctttacagttataaaactcctccattaaatctcctcctattgccgtgagcttcgtaaagtgttgttaatcatatctgtatagtttggtgcttgtgcattactctgtttctccttacgtttacccttgaaggcttgttccatacggttatctacctcttctaagatcgcttggtgctccttaatctctgcgtctgatctgtagtccctaacagactgagcacttccaataaccttaaaccctaacatcttatcgtaaggaccttctggagggttacgaaccttatcagcgtatagtctaacaaacccggctttatattcttcttctgtagagtttacagttagaacaagctctgctgcgttcttcttacggtgtgacccttccatgtgctctgctgttctgatctgagcactataagcggtacggttcatctgagatgctgtccacatgactacgttatagtcttgagcgattcggcgcatttcttcgaatagttttcctccatcttctgcttcattcccagaagcgtgaggatttctaagcaattctggatagtcaacgacaactacatcaatgtcaaccccttgtcggagttttacatccgagataagctgttcaattttagtcggagtgatcgtccgaggagagtacctagcaaagaataagttacctagtttatcccgggcgttcttgtacacttcctgatacttgttgaagttctcttcattcagcccatcacctgtcaaaatctcactccggtttcgacataacattgattgttcaaacttcagaatcattcggttttctaattcctcaagagcgataaacagaacattggctttcatctttgtataattagtcgctaagttagtgagccataatgttttacctgtaccagaggaagcgacaatcatacctaactcacctttagcaagccctccactgtttaattggtcaattgctttaaatcctgtaggtattgtattttgattcaacgtagctaaaacttttcttttatactctgcgtcatcaataacattaatgatctcctgctgtttaccactaatgtccatgagttgaatgcggctccactcctcatccagactttccatcatggattcgttatcaaggtttgtagcagctttcttcagcagttccatacgcatgtacttacgaatatgcttctctatcttttcatcgattacattgttatcgctgctatccctaacttcatacagatcgtttactgcattaaagtatttctgttgtgtttctgcgtccttccgcagtttagttagcttctcttcgacaagaactaatagcgcttcctcagttagctgcttcctgtttgctttgtagtatcttgaaataattaaggagagctccttgtacacctcattaccttcaaagacatctaaaggtgtaatagggagaacctccttagaaaaaacaggagattcaatggcttttcttagaatctgttttgtaatagggctagttgacaagtgtatcatcctccttaaaaaattcatcgactgcttccgctaaaaagtccccttctgataattccgtagtcagttcccactcccgctttacagcaatgttatcgtagttaacaatactgtcttcatcgatatattctccgttatccatgaacttgacaatctgatcgatgtccaatacagagtaatcatctactgggattttttctttaccatactcacggaacgcctcattcagatcagatagggatagatgaagattcttacggtccataattagctcaagtactttaggtgtctcatctaacacgctatactgataagcatatatctttccgctgttcatctgttctttttgatctgttgttgggtgtaacaacatccctaaagctttagcctgtaaatctcgggcttgctctttagtctgtgccatcttacgaaccgaagctaatacgacctgagtatgttctaacccgagaataaagtagcttggcaatcgggttgctcctccggatagaatcatagattgaaggagtacgaactttttaattgtatctctggttttcagagatactttttcgttcagaaggttctcttctgtcagtcgatagaagtcaataagggcttcttccttatcagtaacaccgacacctgttaagaaatcatcaatagaatgtctaaaatgaagcaatcctgttccaacttcagccgtttcataagcttcgataatagctctgactacaaagtcatctgcaaattgagctggaatttgttgatatgttacgtatgtaacactgtttcttttttggtagtcacagtactgcttataaacgtcataagacgtgtctccaataagagcattaacaaacggaagaaccttcttactgttatttagcgctccattgtatactgaacgggagaattgtgcagataagtaaatgtcagcttgtataccattctcctcacagaactgtcgaaacttctcaaactgcttccatcgagaggaaccaaagaactcttcaggaagaacatcgtagctgttgcttactacaggtactttattaccttccccataaacatctacttcagcattatgtctatctgtaaatagagcggcatatcgattatacaaccgtgaaagcaaatatgtacgatagttgccaactgggtcgtctgtctttttaaaccaatcccaagttggcactcctcctagctctttaagctccttattaagcttatcgagttcttcctgttctttgcttcttaggatttttgcctctatcatttgctgttttgttcttctgttacgtgttttcttcttcggttctttctcttttttaggcatctttttctcaacaatgtcatcaatactgataggctcatctgagttaatgaatgccttgtctgaggtatcaaagcggatcatctttgtattaaatacaatgactgtccctcctgctctacctctaaccccttttgtctgaataatgtccttctcttctaactcacttaaatatctggaaaccgttctagtgtctttgcctgcaagttccgctagttcttttttcttaaaggcgatggagaagtctttgatttccttagccttctccacgatcttagttaaaaaatctaaaactctaggctttaaatcgacaatagaggattccaaatacacaccgtattccatatatccgttcctcctgtctcagttttttatattcacattataacatactctgtgtgatatgcaatacctaaatttgttacagaattatttacccaccactttaacatcgaagttttcttctttgaaaatcttaatccgctcattagaatgtcgcagaagaaacgaattcgtctgatcataaaaatcaaagaccataacgctgttaccatcaataccattcaaacggagaccccggccaatacgctgtaattgctgacgcatggattttccacctgctgctagaatcatacaacctatacttttcatatccactccctcgtcaataattgtagatgcaactaaaattttaagatcacctttagagaatctttcgagctgcctactacgatggtctgcatctgagccgccgtgaataaattcaacttctatacccctttctctcaaagaggataaaattcgatctccatgatcaatctctttgacactaattaaaatgcctcccggtcgtttcttccggtaaccttcagctagatcaacaatcactttgtttcggagttcgttctctacaattcctcgtttatatgcttcaagatatgtcccaactagctcgatatctcgtggttcttgaataggtatcagtctgatcgtaggttttgaagaaattcctttattaatgaggaactcatttgacacttttataatgacatcgttaaataaggccctcaaacgttgccagctcattttatctttcttatctacagtacctgtaaggcctactctataagtagcattgttgcaaagagacagagaggtaaaccatgtttctgccttaccatgatgacagttatgtgtcaatgccccattagccacaaatgtatgcgatgaggtcgtaaagtcgtatacatactttttatcttcaaaaaactcgacagaatgaaccttagacaacacgtagtcccctacgcgcactaaaggcgtctcacctttgtttctctccttaatatcttttctcggcataataccaatggtatccatgtatttgttgaacatagacccttcaatacctacacggtacactgtgttatgattttcattttgtcttttaatgatttgtagagtagatactataccaaattttctaagtaaattttgtagacctatcgcaaactccttagagcaagtattaccgaacaaccgataactagggctctttctccttaaaccccctttttcgattgaaatatctccttcacaactaaagtacgtatagataaaggatttaatagactccaaaggtgcgtactgtatctgttcattaatcgttataagatgtgattttttccctctaggtatttgaaatacattttcaagagtagatttaagctccttgtctgtactcctaactgttaagtttcctctgcaatcatagctgtgtttaacttcgtagtctccgttaaacgactttacccctaaagtaaactcttccaagtaccattcctgatcttttgacacattgactttcactcgattgctgacctttgttcttccgtcaggtgtgcacctatctttgtctaaatgtccgtccgccataaccaatgccactagtgagagctgctcaggagtccagttatatttagtgtggtgaggtagcttatagaggactggaatgtaatccccggacttaacactcatcaaaggtacctgttcaaaatcttcctgtgtttttacctttgttttatatttttctaactcctcttctcgaaccacaaaagtcgggtgtgtcaggctaccctctaaaactgtatttcgagatttaacttcgactgtagggacttcccttttgatcaagttagatactgaccctccataaatttcatccttctctttaattttctcaatggcttcccagcctccgtctggtagtaacactagtgagccttctacaagacattcgtcggcaatcatgactttaacggactcgataaattccatggtatccttgtactttttatacttgttcttattcttcttctccataattttatcaaactcaacgacatatttattcagctgcatttgtgcgcttttatctgtaaacttattatcatacgctatgtacatcaactgctcttctgcggatttccaaatctgagttgttagcttacagttttttatataatttcgaagaagttgtctagtattttttgtgtttctaaacttaggagtaatctcctctgcaataaatttaatgactctctctttttgagtgaacttgatcccttttttagggtcctttagtgcactaactaatgtcggtaccattacaaatacgatctttttatttttaatatcgaacttcccgtctccaattttaccgatctctctaggtttcaagttcaatcgttttccaatacgttctgctgactgatggaaaatctctttagagtgggtgaagaaagcaattctttctccccgtttcaagtacgggagtatttgttgcatgatccccgcagcagcttccgttttcccggcattggtagcgagattcacaattcctacctgttctctaaaaactgctttaactgaatcatactgatagtctctaagagtaataggctcttcttccccgttacctagtacaattttttcatcaatactatcggggtgagcaatgggagaaggtcgcacatcttcaatctcgtatttgatattcgggtctttttccataagttttcttagtccctcaaggaactgagaaagcaaacctgtatggaacttattttctttcatgtcataaaaatccgaaataccgtcccaaaccccatttcgatatgcaggggaatattgagctccatcaacttttacacctagttcatggtgtgccatatattgaactttttctttgaggagtgtatccccttcaaagtccactgttgtgtacatcgtgtccacaataatcttcattctctgtattctcctcctatatgtaaagtaactacctctctattgtaccacaaaaatacagtcttgacaagagtgtgtcttatttttggtttaaacactctgtatttattatatagtatatattattaattatatttataaatataaatacagaggagttataattgaaaaagagacaataaagtatggaaagtatgtcagaaatgtttatctatcagtatttaaaaataagacaaaaaaaaaagacaccttattaggtgcctgatcctccttcaagagcagctactctttgctctaagtcttgaagttgtcctgatagagtatctacagttgtcttatctgctttgtctgtctgaagggaacttactgtgttagaaagagtatttacagtagacttatcagctttgtttcctacagcagtttcaagattcgtaaccttagtatctaaggcggttactgtagaactgtcagctttcttacttacatctgtctgaagagttgatactgtattggataaagtacttacagtagacttgtcagctttgtttcctacattcgtctctatcgtattaactttagtcgatagagtggatactgtggagctgtcagcttttgttgctaatgcactttcaatatcagtaacacttttctcgattgagtttactttgtttacaagcccttcaaggtctccaatatcaccgatctgctctttaagctgtttgtcaatctgtacgagtcttgctgcaagtgtctctattgcgttaggaaggttatggtacatactatcccgttccatactattcatcagtcatacctccactcttattccttatcttttaaagaattcattatattctgtagttcttgtttcattttttcaacttcctctaaactttgggtaagctgccgctgatctctgaccagcgaccgctccctagttgttggaataaacagccgtgctttagaagctggatcacgtctctctgctggcatgttcatcctcctccttaaatgtcgtctttaaatactcccgtaaaccgtcttacacgaggtctaacaaatcggttgtcagctcggagttccagtttaaatttcaaggattttgcaagattgtttgctggagctacgtttgttgcagtaaattcatatcgactaaactcagcagattgaggagtaatcttagggttttttaactcaacccagttctcccctttatctagagagtagaatggtgtaactttcgttcccggaggaattgcagcatcataagacactttcaagtctttaaatggtgcgtctgttgcatcgatagtcactgatacgtagtctcctgcggtttcagaaatgaagtttacgaacagcaaatcttcaagtgtcaacatcggagagatataccgattagacttaaatgttgcccgcagcttaactacaccaataaccattggattgataatcttctcaatgtagttagaaagaggctgccaaggtacatcgtcaatcgagatcgttccaacatctgctttatcgatcgccttaacttcccaagtacatcctgtattggatggtgtcaggtaagaggccatcaatagaatcatgtctgaatcaaggtcttcgataggatcaaattcaacaacagcgttctcttggaagtaagccgtgtaaacgttgaatttaaggtcagagctttggtgtactgtccacgtacgtgcatttgatgaactaaacagtacgccttgtacatatgggttagatacaaccttagcagacggatcatctactcggttttgtcccaaagtagccaaccacattgtatactcgttactgtctgtgataataacgatacagtaactttggcctgctttacacattaacggatcatctagagcaaccttcgtagctttagaagcgtcgtcagacacttggacttcagcaggtgttaggattctttcagcatatactgtttggttaggccatcctccgtcagacataccacgtacttgaacgatcaagttatctgtggtagacttagaagcgaagaataggtcaaaacttgttactacccgatcttgcgggaatacgaatgattgagctaatgggtcgtataagttaactgtaacccgagtacgcgtaacgacttcttcagttgttttcagcgttccttgagctacgtatgtagtaaaggcgttgtttgttgagttctggagaacgacttcacgtacgccagtacgcacacccgcagggattgtgaatttacctgtggcttttccgctagcatctgctcgaatagttccagtttcggaacctgctactgtacttccagtaggtgtcaccgggacacggattccgtcaaatgtcaagtaaaggttattagccatcggctgaaggttctcagcaacgaagttaatgtctctttgacggatgaactcgatagctgattcacggatagaagaagatacgttagtcagagtacctgtacgccctagtagcttatcttgagcaagggagttacccatatcccatttttggtttccgtccaagacaaggttatctactagatactggaggtctttgtgtttagttgtagtacggccgtgcctccaccatctatccattcggactgtttgggtttcttctttgttaacaacaaccttagtttcttcgatccagttgtcagcagacggatcaagtttaatagttccaagtttgttatatactgcgtaagggttaacattcattgcttctgttgcaaacggctgagaaatctcttttgtttccgtatatggtgcagttacaatccgtccccacattgcagcaatagatttatctttagagaactccggaaccttttgttgatctgacggggcattaacctgtaaggtgatacttgcgtcctcaaagctaacagcaacagatgattggttcaagtccatacgagtgaagtcaacgaaaccatctgcaaacaccccacgtagagttagcggatcatctacagcgatagatgagtcttccaaagccataatcgattggttgtattctacgttttctagacgtgttttcagtttctgaagatcagacatccgtaaacgaacaacacctgtattagttgcttcagcgatgtcagagttaggatatacgaatacagtaccaatgatcagagttaacgggtcagactgatctggtacttccgcaacctctgcacggtctggctgcccttcgatgactgtgaaagcgcctttgttatttaaagtaacaaggtctactcgtgctaggtagaaatcataagtaatcctaacgactccgccatttttaggtttatgaccagtcataccgttgaagtctacataagtatcccatccagcagtaccctcgattggagtcattgtgactttgtagtctacgttatcctgcatgactcgatcatattcaaaagatagttggtatgactgacctgtgttaggctcagtaccattcatacctgtattccagtctacgtattggataccgttctcttggacgattttgtagtctgttccgtaggtgtagatatactctgggtttgtggtccaaagacgagtagtagttggatcaatgctagtatattccgctgggatagggtctctaccatctcgaacacctttagacactgtaataccgcctacaggactctcagtacgagcgactacacggttaacggattttacagagctacttccaactttaatcttacgaacagcggtatcatatgtatgtgtttcttggataacttctctgtatgtaagagacttattcaatgggatacgagttgcagtcggtttgtggatacgataacctagcacataagctgtaccgccatcaatgacgagatcaactttaccttctgtctcactcggctctgtccacattgcaaaaccttctacttggtaagaaccggattcctcgtaagtccgttgggctaaggtctcattaatcaaagagaactcaggacgatctggttcgacaaagaggttcccgtcattaaactcgtaaatcgttggagctgcttcatcattgtttgtcaagataactgtttcttctaggcggtcagctcccggagagttgtaacttggaactccttgagttgggtccaacaaagaagggtcttcattataatcaataatacgttgttgtagctttactccgattttttcattccctactccggagaaagggattgtttgtttatcaaagttacggactttacctgctaagtatacttcaccgtcttcaactgtgattgtctttttctcagagtcgatagagaaagacatcccgttctgaagggctccgtcttcaaaaatactgtcaccaagttgttgtgtattgtactcagcgatagactggagttcaattaactctgagttttgaagaggtctgtcgggttggaaaagaactttagttctgtttttcttagggtcaaagcggtcattataaggtgactgtcccaaattgatatctgccaaagttattcactcctttaaattaaacttctaccataaattgttcttgaacggtaacactggatgttctattttgtggctccctattttcatagaaacgcaggattcccgggtctttaacttctgaagggaggaggttttgtttagttactccatcgttaggtacgagatttacatgaatacctacttgcctatatgggcctagaggcagctcatctggtttaatctcggcttcaatgtacacatagtaagctttttcttcataggctttatctacagggattaacacccattccttatctccatagctaactacaggatatggtgcgttatctgctgtctctgtagagcttagcggcctagccaaagaaaactgttttactttcttatacccgataacttcagaaatctctgtagcattcgggtcttcgtctggtgggttattatcgtctgtccaaggagttgttttaccaataacaaggtaagcgctactccactgagactgtagctgaatagcatcataaatatttgaatacaacgttgcaattgccattgtttagttttcaccctctcatctgtcattcgttaacacgtctattactaatatagcagtattttgttccataatattattataccacatattaaaaaggagccgccttttgcgactccttagttagtatttaagaagcaggttctgttttagtcttaatgtaactcattggagactctccgagactgttaactgctgtaacattgattgacaggttcgtgtccgctgaaatgttctctactaagcagctaggttctgtaacttctttgtagaatactttctcagctcctctgtaaactttataagaggtagcgtccggtactgcgtcccacgtcactgttgtagagttcgtggtgctagtaaactgaagattctgaggtgcagcaggtgtcctgtctcctaagaagtaaacactgaagctgcttccagcccctacgcctatactctcagtcagcgggtttatttgaggataaataacgtcccctttgctgaaactatggacaaaggaagcttttagtatcggacgtaagttagcattagagtaaaggacatcttgcatgtctacgtccgtagtatcatttagcttaacaccaaaacgaacatatccaatcgtctcagccaagtcagccgtcagcttaattgttaggtctacaacatacacgcctgatctcggaatagtaaaggactgttcagttacgcttcctgctggatatgaagatacaacagtatccaaggccgttagctttgtataatttcctgatacaatgtcctgagtagcggtaacactgttaagaataacgtggttactgaagtttccttggttgtacacctctttaccttcaacttgcaacagcggggaagaaacattaaccttatcttttcctttgatctctgttggtgcggtgtcgttaccaaaagttgttgcttcactagatgttccgactactccttgtagtttggaaacgtctgtctttagcttccctgtatctgttttcaaagtccctgtatcagttttaagagttgatatatcagactttgctgtattcatgtctgtatgaagagtagacacttccccttttacagtagtcatatctccatccagtgtctgaatctcagacttaacatcttgcatgtctgcatccagtgtttggatgtttgcttgagcagttcccatatctttctgcaagtttgttacattagtttttaccccattaacatctgcttgggttgtttgtagattttcttttacagtagatacttctgtttctacagatgcaacgtcccctttaatatcttctaaagatttattgtctgcaaactggacgttaccatccgaagcacctacaaagaattttttagtatccgtggtgaaggcaggttcccctacatctagcgaagggatgtctgcctcaactccttgtcttaactttatctttgcacgctggatttccgccatgataccaacctccgttgtattagtttgattgaattatagaatgtctatttgtgactgttttcttgagattaattgtaggccggatagcaacctctgtattaaacccaagttcaaagaagtcgatctgtaaatcaaacatttctcctgaaacgtttccatctagttctttatcgtaagagatacctgtaaaacttcctccgttgatctctaaatcatagtcgttctggtcgaatgatccaccttcaacaacaggtcctcgatacatatagttcttcatagagtctatttttacgtttccatctagtactttatcgtaacctgtaaaacttcctccgttgatctctaaatcatagtcgttctggtcgaatgatccgccttcaacaacaggtcctcgactataaggaatttctaatcgagtaaatacgataccctcgtcagacacatagttcttcatagagtctatttttacgttaccttcaactccataaacactcaccatacctgattctagactgtcccacgaacctgtgtttagattcaatatttgaacgatgtatccagatggcttggagactgacaagagagcactcatgctgtactgaatatatggttttttcattaatgatacgtatgtatcttttgtatagattccgtccggttgaacttctcgtaaatacttactgtagttcaatctgaagtacgtagcaatgtctagcgtaaagtacaggtagtctgatcgagatgcgtccatagactgaatggcatactgtccgtcaatcgctcctgttcttgtatagaagtctggagatacagcttctgttttacttagcacatcgggaacctttgtcttattatcaaagactaagttgtgtgctgagtatgatgctagattgtatgacgggttagaagcagagaacgatccggccaaccgatctaaagagttcaagtcactgttgttagtatggaatattctgctttcatcttcctcagttcttgatctcgctgtaaggtttacgtgccctctaatccgatcaattaatccgttccaaatagatagcttcgtatagtttgttacgatgtcatcaccaagaacgataattggtgcatctggattattatatcccggtctatacgtgagcaggacagtaactccggcaggtttaaactcgttgattatatccatgatgtctggaggaaacggcttggaaaacttaatgtcaataacagcggtagtgtaatacttaccttggatgtggtctactccgtccagcttcgatttattcaaatagaagatgttcgtataaggttcgtaaatttctatgtatgacacgtagtcattaaggaactcccggatcgcatcaagaagagcaggtattgttcctctttttaacagtacataatttataatgcgctgcctgtaaacgtcatcctcctctttgtcacgccggattactccaaatagtgatccgtacctatctaaccattctccggttgctgtatctaaagacagcattagtttactttggatagtagcttcctctgtgtttgttaactctatgtctattgctgataagatcgcagcgtttgcttttgtcttatcttcaagattcgttttccatgcaggcagcaagtgctttaaaaaagacatgaagccttaacctcccttctacttcagagttactgtcacgttacctgctctaataacttcagaaccctttaaagtgacattccctgtcggctccttaaaggagacatcataaattagttgtctatcgatatacttaatcacactcattaaatcagacagaactaaactctgagatgtctgcatattattcaggtatctgacaatttccattttaatcttgtcacggaacgtatctgtaatcgaaaccttatttgtcaaagttacaactacatcaacatcaattgattttcttgttacagggaaaacccttactggaatgcctgctggtctgtagtagtaaagaacttcctcgatcttctctttaacatgatcaggtaagtttccgtttctgtcgtgtgcataaacgtttactcgtccagtttcttcatgaatgaatactccagatacctctggaactgttctagtcccgtagtcaattgcaggaacagtagctctacttaaagatttaatgaaggattggaaacgagaacgcatttcttcaattggctccgcatcttgccctgtttgaaacgcttgtgggtttgttactgctcttatgtttgcaatcggactttggatgatgtcaattacatctgcgggaatgtttcctgttgatcccggagaggtacagtatacttctacttctgctacaagtgatcctttagggatatagtagtctatgagtgtttcatatacctgaggatactccgaaattcctgaagagaatcgtgaacctcttgaaataaccatgtcagaggatgcaggactatgtagaaaaatttgtacaaccccgtatgcacgtattgcaggttttcgggtaaatccgaatgagctgtagacaccttgctcaatagcttccatcatgttttctcttgtaagaatgtaatactgttcaagctctatagagatagcttcatacagggctctcatggcgcttcctacagagaagtcgttaatctctcttgtgtttgtaattgtgtggtcaactaaccgagaataaatctcggacatacgtttaaatttcatgattaccctcccctcatatcattgagtcattaaagttatcaagtaaaacaattggtccgtcttgctgtgcggcaataacaaactcaaaagcctcttctagtgtgatacttgatacagtgaacgaagtcttaaatgtatttccgctgattacatggccgttatggttaactgatacaactcgggcgtctgttctaagcgttctttcgatctctagattaataagagcagcagtctcttcgttgtttttcatccctacataagtattcaggtctgatccgtattctgggtgacctacgtaacttcctctgggagtaatgagtctcacaaataaagactgctttaagttctcaatacctcgtacagtagcgatagctccacgaccattccctttcatctccaatatctgagaatcccatcccggggaaccaaatcctcttggaagaggcaggatatctaaatccttaccgagtgcaagagcgtagatttcttcttggtcgtattccggcatacgctttagttcattgatcaactcagactgaatgtcgtctgaaatacgtaccagcaatgtgtctcctattgtaacgaggtggtctgggttcttcatcttctcttctacggtgtctacaatgtagggatactttaagttattaaactccgctaagctcacccactgagacatatcacccatcttttgttgggcgatagactgcatagtatccccgtatgatacgatgtgttttatgaatcttaccaactatcttccacctctttctaccataatgacatcgatctggttctcgatataaccgaaagaaatattcatttctctcatattctcgatcatgtgataatatttaggatcagtactaaagaagtccgcaataaagtttgtgtttgtctttattgtacgaatgtctctggttgatacatactgtaaattctttggtgagttttcaatgttgtacagcaaagagaatgactctaacacaacagccttcagcaataagtagatatccggggaaaaggaagataggttactattaagagccttcatgacgattgtgtttgaatccaaggcatcattcgttacttctattgtaccattatttagctcgttctgtgtgattctggatagcaccgttaacgcatatgtaggtttgtacagtttagactcaaatgcgtcatcatctgttatgttgttaagcgggattgttccgtcgttaagaacaggtatacctgaaatgaatctaattaagtcagacgagaaagccatgttccaccctcccttaaataatatccaatgttgtatcctagaccggacataccgtagttgtatgcagtaggagatggagcttgaggatttattggttcggttgcctctgggggcggtgtatacacatcagtatttcctttattgtagatatccggattacctgaagaagggtcgtatgggtccggttctggcttctctcctgttcccgggtcaggacgattcttactcggatcagggagagaagggaacctgtttccaatttcagggtctacaatatcatcatcagaaggttcactagccttccgcagcaccaccatcttaatttcgtacctatgggttagcggggagttaacatcctgtgtatatgtgacaccctctgtggacaagtgaacgacataactctcatcgtttgtgaagtcatggaaataaaaatcctgtgctgctttactcccgttaccacccatgttagcgtagtcctcaagaaatttcttcatctctttgattttattgatacctctatcttgtttacgtccagtagggttaaaccctgttgtaccactaatagtgatagttggcacatctgcctgaaagtcctcgataacgattctgcttttggttttaacagccgttgtacggtgtggtctagcaaatgtgtagttttccggatttatcgcaaatctaaagaatctgttaccaaactgaaaagcaatttttctcagtctatttttaccatctgccattggcatagcttctcacctctctttaataatataagaaaagacagggatttcacctgtctttacactactcttcggagatcgtatttgtccagtaattcttgtggtgttaaacctcccatgtccttttgatcttttctcggaatacctgcttcgataaacgctctatcaataacttcagaacatatgtatctatttactttgttaaatactgttgtacgaatatcgaatactacacgtagtaacaaacctataatatgtaagtaatcataccttgcaccttccataagtacagcagcattgacaatctttacacggtcttctggagatatgttatttaacctgtatacactatgtacattttctgtgtaatgtaaatccgctattctggttttaataaacctgttggcctctatgatttttgtagggcttatcgcaagggatacatggctgtattctgatctagttagcttacaaataacgttcccgataaatcctgtaggccgatagaaaataacatctccgggttttatatctaccattatttcagccccttacatgaataagtctgctaggtggttaaacctagcagctttttaatacagtcattcaggattaatcggtgtttctccgtctcccgggttttccgatggtggctcctctggagagggttctacaggtgtctcttcttctggtttgtcaggttctggctcttcaggggatggatcaagtgtatatgtttcccagtctaaaggcagaatatcttcgtgagttttagctgctaaaatttttgttttaagttcgttgaacttaaagatcaagttctgtttatgttgaaatgcttcgctatagactttgagccattcttctcttgtatgcttaatataacccgcatcttcggttttccagagaacctctgtgatagtagggtccatgtttaacagcatcatctgccctagcatgtttgtttgatcgtcttggtttgttctatagaagtgtccgttagaagcggtgaaccctttatagatgtctagtttacactgtgtgtccatacgagagattttcatatctttgtggtattgtaaaatgtcgtcttctgaaatctggttcacaggaacaccctttctactagctaagtatctaataaattgatttttctcctctaagtcaaaagcattataacctgattcgagcattttctgttctagacgagttaaagacatcaacatctcctccattattgtttattctctttttccttgttttcttgtaatttttcttctaattgtgcaatatatgctcttagcattaaattctcagatgtcagttcattaaccgcattttgatactcaattaacatgtactctgataggatttcttttttatttttcattttgttgtcctcctagttgttctttaagtttttgtacttcttcttctagctgctttacttttgtctggtggctcctgaccagaggtatcagaaatacccaaagcctatcgtaggctataccctctacctcagcgttaccttgctcgtcttctgggccgtatataacaaacatgtctaaaccagcatctagtagctcctccgcaatcaacccataagctcttttagtgctaggcataacagctaagttagggtcttctccactatgaactttagtcatatactccgccctgagttccatatccctcttatcatgccacgacttagggtctaaatatagtatcctttcaaaaatggagtcgtctacagactttatatttaatttatactttcgagcagagccctgtctgcccaagtcccctgtatttgtaattagggctgatgcaaccccattagtggttgtgatctctctggtccatatatcaactgattgtactctgtttcctttagcgtcagaagatacacttaggctccccccttgatcactaattaatctggcaacacccatactaccaaagttagtaatacctccagattcccctttaaaccagtttccggtattataaacgttaccagcatcagagatagttaactttcttgatgttccaacggctatctgaagagggccggagttgttagacatgttgttaggagcttctacaatacgccacccggtaccgtttcggaattgaatacctctgttacctccgggtcctccgattgtgtatcggtatgcgttgtctaccgacttgttctgcatatcgaagtcattattaaaggatatctttgatcccggggtattaaacgtcactacgctgtctcgaatagagaactcgtcatagtcatccaagttactggagcccgaagttttacctgttttaaggaatagaagaccttcaccattattcggttgtgctacatcattaaagaataacccattaagacctgtgatatctgagttgtttaagtgtagggctccgataccttctccttggtttgttgtctgccaaaaagtatttccgaagataacacgtccgttaatttttacctcgtactctccgtctggaaaatcgaagaaacctacagactttctgtctgggtccataaacatgataggccgtccagcaggaacaacaagacgttttgttgtagaggttaacatgtcagatacttctacttcaatttcaaaagtcagagttgtatctaatgtaagtggtacgtttgttgcggtatagcttgggaacccagacaggctgaatgcttgccagtctccgaaagaagttgcttccgcctgcttgtacctgtatcttgcaatctctacgctgtttctattggttccgttcacactaagaggagatacactccctttcagtgtcaaagtggtatctggttcaaaaccatttgtacgttttgcagttgttgtaactacaggtgtagagtaaggaaccatttttatacttttagataccgaagtactaaatcctcgggaatctactgctttaacagttatcgtcgtaacatcgcttgacgcaatcgtaccaaagtcgattgctatagcttcgttagacacatagtttgcctttttggttaccccgttgactgcaactgaatagtagtcgattgtcgctccgtttttaggagttgccatcgcttccttcggaatctctactcgtaatgtggaatagttctggataaggtactgatcatctgctgtgattgctaaagttgtcggattcgtatccatataatagattcccgttgcagagaagtctggcttactattgctttcccgaatataaaacttaatactgtgatctgttgatcctacaatctgatcaccgtcgtagtaagtcgtaacgtggatagtacctgctctattcgatgtgttaggcatctgggctgctagggaagcctgctcactagctgtcggagtccatttgaagcttgtggacactccggtaagtgttttcttgaatgacccacactcaattgaaatcgtgtgagtaaatgcactgttagatcgagaaatacctacagacatttcttggtcaatatagaagttattagtgccgctagcttgaccgttggtggagcttactgtacttaggctaggtctacttactttacctgagtaagtattataccctatactatttcctccgctgagagtatgtaggttccacctaacatccattgaactcctttgattcaacctgtaaaaaatttctctgtattcactaacagaaaatgacgtagacttagatgtctctgaagtagagaagttaatgattttaatatttttccagttaccatcagagcctttaacgtctatgtggagtctgtgaccaaaagaggacgactgcctagagatagatatatttctgttggttcctgctgtaaaactagggctagatgtcatggtagaaagtcttgggattgtgttcagtgtgtaagacttagaggcaatacttactttggtgtactttttaccccctaaatacacatctggtaggttaaaaacaccgctaattgagaaagactttttaccatcactattgtgctttattgttttggatttagttgcaagtagctttttctggtttgcactaagtccagccagaccattacctccaaagctatatgaggaaccatctattgttatagttccgcttgcgtgtgcagtcgagttgactctcccataaccatctaaagcttcccagtacatcttcgctgtaacagtactggagttgtttgaaatactttgagaagctgaccatgagatagacaacctccagtgagcaccaacgttagtgtataacgttcctgataaagccaatattcttacctccctttctaagtaaacgttctataagtaatatagaaaaggatacctgtttgtcataattatattataacataaaataacaggtacccctctattttagtctatattcggtacgtaagcccaccctctccgagtttctgtctcgatattcaggattttaataggtcccatcgtcatttctgtttctgctcgaagtttcttcgttacagtttcctctccattaagatagaaaatcttttggaaagaaccgttaccctctgcatcgtagtaacctgcaaactcttgaggagtgatctgcgtatacccgatctcttttcggttctcgtctagctgagatactcggattccattaacgtccatccggatatgagtgttgtatacttcccctgtagctagagaccactgtaaaggtacgtccccgatggttagcattattcccgttaaggtagcgtctacatcagcgtaaccgataaatctaacagtgattgtgtcagattgagggatataggtcatatgacttgcatcataacctgtgtttgtcattgtactgttatctgcaatctgcatctttgttaccccgtcttcctgaatctggacccagaatcggtaagacatggtgtctccgcctgtccttttattcagataccaagatagtgtataaggctgccccgcattaactttaacagtttgggcgatccctttattaacaccatcaggtttaaacaggaacccactcccgaatccaagactgtctagttcgttggtgctaatagtttcaacaagattcggagggtaagtcaggtcccaaaagtccagtcctgcaaatccaatggagtttttaattaaattcaaaccaccagtagcgtagaacttggcagtaatgttgttagctgtctgctctaattctgacttagtaacataaggagagaaatcaattgcatttactgcatttgtgattcgatcgttgacatccttggaaaggtcatctagctctccagaagttgcatagtttcctaagtcctcgacactagctttacttgacatagcaatctgatactctatagactgagtaacggtgttgacgattgagctgtctgtaatcttttcctctgctttagaaatccttctttgcatcgtagggatcagatacttcagactgtcggtaacagtagcaaggtttgtagcgtatttgatcttaccgtcagttatcggaggagtgttaaccgggtagtcaattgtgattgagttctccccttccaacagggacagtatgccatcataagtcaccgcttgctggattgcatctatgtaacgataaacgatctggtactcgttaatggactgctccttaatggttggagaagagtctgtagggactgggttgtatgttgttccagacatagttgaacggcttaggtctgtatctccaatagggtaccaaactttattgcctgttccatcatacgggacaccgaatgttccgttacacattctccatccattaaaatacgctttgatctctggttctgtaggtgtatatgattccccccacccgctgtctgtgtcacttacagtgataaacaacgtattagtatcattatccaccattacctcgtcagcagcacttgtagtgccactggcagcggctaagaatgctccgtcatatttaaccccctggattgccatatctgcaacaagatactcagagaactctccgaatttaacttgtttgtatccggtgaaatcttgatcgaacttccagtcaagtgtaccgtctagagatacatcgtcccatcgcttaatcttaactgctctaccctctaaatcccatgtaaactcatcattaatcgttccatccccgtatagctttgtatacagtgttaaagaccctgctgagttaaaaattggattcgtgataggtacaagcctgtttccgtttagcgcccacgatgactctgcatctgggttcattgaccacaagtctacgtgtcttccttggaatgatggtagacctaaacttgtaatcggagaattaataattgttgggttagctaacggaacttcctgaaattgctgtgcgttactgaccgctttaattgcatcctgtttagccccgtctgctactatatcagaatactctttctgtcgtttcgtgactttaatttctagaaggttagctgcgtaatagtaaccattccatgccgcatcccactcatcgctgttaatatcgagtgtttctgaagagtcaatatcccacggttttatgcttaggccagacagatatgtcctcagcgctgtataagcatccccaagtttaacataatccgcatccgtgataggtacaccgatctctctagcttgctgtctaagagtgtacaaggaccctaccccgttagcgtctacttctgctagtgtaggcatatcatcagttgcagaaagataaacaccaatgatgtttgccaactctcctcgaactacgcttcgttcataacgagtaagcctgttatctaaatccaagtcagtaatggcattatatgtgtcttggattttatcgtaagcatccgggtccaattgacgaagactatcatagtctgttgggtcccagtttccgtttttgtagatgtacaagcgatacggaggttcccctgaagtattcatccagagtgttccttctgtcgggttttccggcggagtatcactaatggtgatgtcgtaagcaaacccgataatagaaatctgagctgcggcaatacctgttacatcacaagtgaatgttgctctgcttggaacgtcctgtgcagtaatgtgtacagacttcattccggaagagtgagcgttgttccattgttcgtctcctgctgcatcatcggaaacacgagtccacttaaataggctagcatctaaagtgtttgttaactctttatttccatggtacactttacagaataaagtagtgtctgtagacccatctctaaagatgtttccatttgtgcttagaatgtccgccttataggttacgttcttctcaacgtcatctacacgactattcgtatcttggatttctttagttaaggtctcgtctgtagctgcaatcttagagttaacatcagagatagcatttgtgaatgttgtggagtctactttagacgtaatagactcagctaactgagtgatctcggaattgacaatcttaatctccccgttaacatagtctttggcgtcgtctaaagcttctttagctttagcgaaggagataatatccacagcagattcaaactccttagagaggtccccaaggaccgctctatattctgcaaaagcgtgatcaactgcatcacggtcttcttgtgtgatcttaccgtcaacaatggctccgtgaatagctgcaattaaactatcgtgttttgcatcgtaagcatctttggcactttttaggctagctttccctgcttcagacaagtattcgttgttataaatctcggtgtacttaccgtctatgtctgccttctctgtattgattgtgttaatatatgcctgaattacttttgcttcagatgcgtcaataacaccgtctttaaacgcaccatcgatataactatctaagtcagaaatctgttttccgatatcctcaatttcagagttaactccgttgaccaattcttcagtaaattcccttatatcttctaatccagcgttatactctgttctgctgatctttgtagagataaccccattcatcacagtaatacttgttttaagctcattcaagccgtcgatgatgtcttggaaagtaatctggtttccatccgggtcagtaccaccaacaaaagctgcgataggttttccatcaacataaacaccgtcattattgacttcgaataaatgcttttgagatttaaggacaaggaacccttctggggtgataccaaactttgaaaatttagttgattcttgttctgggtctgctgtgtcctttttctgagtgatctcaaatgctccatctgtacccatttgcatgaaggtaattccttcaccctctacatgcctactaccaagtcggaatgttccatcagctttaatgaacattgtcacccggtgattatcgtagatgccttggtggacatatagaactgtaggagcattaggggacttaggttcaattagctctccatctgcataacgagaactaggaaggtcttgatagtcaaatgccccatcctggacataggcgttatctgggtccgtgtctgtgatgtacataaaggacttaccggagaaggtgatttcttggttcccgttaccgtcaatattcttatatgtcatagaagggtacagatcgaatatctgccacagctctctctgcatatcttcatctgcaatatctccgcctgtgaacgttgttcttgttagctgagactggttatctgagtcgctgtagatattcaggacgataggatactccttgttcccctcaagaaacccgataaggaccaaggaacctacagttgcaagcgttgttgacccatatacattaccgtctggtgttctacctccgaattttacgggtaaccgagcagaatatttaccgttatcattagggttctttacgaatgcgtctttcccttggaccgttactacatcgacagtgttgtatttgtagttaactttaacgacacgagccaatgacagtttaacaacattctgtccttctttgtacatcctcctaacctctttacctagttgagattggagtctcataggtgaaagaggggtgttaaattgatcgaacttttcattatccaagtgattcaccctcctctagttttagcctttatatcgaagtacacggccgttaaatttctgccaccagtaaccgctagtcatactctcttctttaatacctgacttactttgggagccgataaacttaccgttcccgctataaattccaatatgaccgtcacctttatatgtatcaaaataaacaaggtctcctaattggagtttgcttttagctgctgacttagacgatcctctagaacttactgtcataagctgagaatcggttttaattgtgtctgttgtcattcctgtctttccgcctttaagggttatgccatttaagtagaaacaccaccatacaaaagcggaacagtcaattctaataggtgttgttaggaatgggttgcttcccgaccttcctccaccaaagacatatacagagtttctccctgtcatctctctggctgtttcgagagctcccattgctcctccacttccggctccatctccccatgaaccgcttccgtcttcagaaggggcattagcttttttagcttcttttaagaggtcttgtaaagagctctctccaaggtatcctcctttaaagtctttagatttaccccaaaggttactaaatcggtcttctccggagttaggtaatccacgggttactccgataacagttgtatacccgttggtgaaactaaactcgtgctgaacagactctacatagaactcccaagttgttttctgctctaaatcttcatagagtacccgggaaccgagtctgtaagctggacttccaaggacacgaatatctccattataaaagtttccgttctcacagtaccagttgaatagtctctgtgtaaatctttctagctttgcgttagctacacttttttctttgttaatttctttgtccctttctgcgtctcctgtagacgttgtaaggttgttgtattcctcccgggtaaacttgccttctttaagactatctaggatgttatttgccaagctatcagaaatagatggaaacttagagatcagttctgaatatattgtgtttttttgtgtcctaagaatttcaggttcttggtacccattgtccgtaataaattttaaaacttcctcgtaagttggtagaggggctgcaccatcctgcggattggcagaagcgttggttgtatcattaagtgctgtcgatagtaaatatctattctgtgcatccagccgtttatatccttttttcttgattaaatctgggtggaatttagggtacacacctaagtccatactagtaaactccgctatgttaggcgcttgaacaacaaacactgaatacagttcctcgtcattcttacctacagactcctcgactacaatatcagaagtaaacctatactttggaagttggtaccagtagtccgggtcaaacggtgtcggtctcatgagagcagtacacttaccgctggccgtaaactcgaaaaatagttcattaaatggcttagctgctatatcttcaaggaactgtctaatacttccctcgtagttaatgaatggggtaacatctcctagagattcatccttttcccaacttgtaaagttatgatctaagtaatcttttagtccttttttatttgcaaaattgtacttagcatacttgtaaacaaacttctccataagctcattaccaattcccgcagccgtattcccagaaaatttaagtccactatcgtcttgcctatcaggtaaccatccgtctacaagtactgtagatacttcttgaatgactcctacctcgaaatctattagcgcttttgtcatagctcgaccagttatacggtagaataacgatccttctgaaaactccccctctttacgaatgtcagaaatcaagccaaccataatgtaggggttatccggtctacctttagttgagtcaggaataactctaatccttattaaatcgttagagtttattatcttatcccacttttccttagcaagtataactaaagagaagacaggactgtcatcttccatggagtttttagtactgaaagagattaatgcctcttcgaagtcattctgctttaactgcttttgtttttctgtatcgtatgtaagctcatatgatgtcttctcagtaatcaaatctatttcaaattttggaaatctacgaacaacggtcgtgataggtcatccctccgatcttataaaatacctctcatatactattataacacgaagaataaaaaacgaagaggttataccctcttcgtctcttgtgcaaaatactgcattccatagattctattctggatatcattagccatcttcttcatctctgcgctatttgtaaccttagacgatacatcgtttccagttacattcacgtttatggtagactctactttcattgttccggttcctgaaggagctcctttcatgatgctgctgatacggttagcccattgtgggtctgtagcgtatccagcctgcttcatcttagacaaagtggtgtttcctttattgtagtaattctcagaaatccacttagctccctctatgatacccttttctctaccttcaaatgacttagcagaagagaaaggagaattatcaaaggcaccaataccgaaccagttgttcttgctcttgaggatgttagaagtcccccaccctgtttcttgtgcagcgtgtgcaatcaagtaacgagggtccagcccagactcctgcccggctttaaagaatgcttctcccatacccctcattaaagagttcttaggtgctttagagtcaatccatttgttaaggtcttcggctgtaagtttaccatccgtataccctaaatcggagtttgttaagtcagaaggattcgcccacttcttaccttcgggaagaatttttagagagcctgagctacctgaaatggcgcttccgcctcctcccgcacttccagttagtgatccaaaaatgcctccttgcattcttgcttggttaagaagacgagatgctctagttagtaagctgtcgtattctttgatattttgtctctctagggctaggttatcagtcctctggttttctgctctatccttagtgtttgtattctccctgtctacctgtttgtctagctgactattcattggttctgctttttgtttctcttcaggtaattcagcggcttcagcttttttaggatcaaatagaccgcctagccagccgccaattccactacctcccacagaaccgataataccgccagcgatcccgccaattgcagtaccgacaacagggactacagaacctatagaggctccgagggcagcccctgccatacctcctccgattccacctgctgcggaaccgacggcttcaccttttttatcctccggtgcaagggcaatagcccctatgctggttgcgatactaagaggtaaggcagctttagaagcaaaactaccaacctttccgagaccttgcattatctttcctccgccggcagcagttccagcggcggtacctgcttcagcagcggcaaaacttgttccacccataaatcggtttagaggtcctcctccgccggatggtcctgtattaggcaatcctcctcgtctaacgttaggatcaaatagacctccgacagcagttcgtgtggtagttaaaaagccaccaatacgacctccaccgccaccttgcggtcccccacctccaggaaacctgtcgcttacccttccacgtaataacgaacctcccaaaaaagatgcagccgcacctgttgcagaggctgcgagggcagcaagagcagcagttgcagtataagtaacaggtgataacgaccccatagcattatttagttctcttaatttctccccgtagtcatacagctgagtcgcttgcttttctgttgttgcatcactctggttatcaatagcttctgaggaaccctgatactttgctaacttatcttgagactctttagctcctgtagccttgtccgtctccacatatttcttgatcgtttcctcagttaatttttcctgtcggtctaggtccattaagcctcttgcttgttctgctgtaatgtctacccctaatgcagactgcacaaaagtggcaaacgcctcgttttgggctgcttcagaacttcctccctcatttctagcccatctagcaatttttcggacattatcaacatcggctatacctttatccatcttttcacgtagagcgaaccttcccgctaaaccttggtattctgttccttggccaaataccatccttacagccgggttattaaatccttgacggataccttggtttaaatcagtcagaagctgtccgcctttttctccggttaatgaacgtactcctgaacttgcaagaacagattgcatacccataacgttcattacttcctcattagacatagaacgaccttgggaagtactttggagaatcccctgtaacgcttttaactgatctttttcacggccttccattccactctgcttaattgcaccaacaaaggcattttgtacatctttaacttgtgaacctgacacagcaccagtactgaaagcagaatcaaaaaattgtctagtagtatctgaatcaatacccgttgtacggctaaataccgcttggttggtcatggcagcgtttaggtcacccatacctttatacccagcattatctagatagttaccttggaaggctaacatctcttgtcctgtaaatccaagctgatcttttaacccggcttcaagagcgttatctctaatgtctcttcgccagttttcggcacctgtacgctgtcccatagagataatatctccacgcatactacggtttagctgcgctccttggttgtagagacctccggctacggcagcagcggcagctgttaccgctaaaccaatggcaggggcacgctcgtataacatacctcttgtagttccacgttcaggtttaacctcaactccgccgtttttagcaagctcatcattgtacttacgcatgttattaatagttctctctaaagtacggttgagctccatccgtgtttccatctctttgtcaatagaagctacggtttgctgcatagcaattttcatatccctatctcgctgagaggcattagggttagtctcaatatcgctaattttctgcttcagactggaccgttcttgaccgagactagccattgcattagtattagcctctttttctgcggcgtaacgggtacgagaagtgttgtaatctttaatgaagtttgaatactgttgataagacatgtacccagaagcactagctctacgagacaagctttctgatcgtctatccagtttatttacttctctaatcttggagatgacatcattaagcttacttgatgctccatcagcctcattagacatcgctgaaataatggacttagctctgttgaagttctgagctcctgtaggaagattgtatatatcattggaattaaaaacatgtttaaagcttttagaagctgtttgttgaaaagaagagagctctcgaaacttggctagagttttagtatactctgattggagggctttctgctgagcgatagctgctctgctttgctcatccatccgccgtttaaggtcttgtatttgccttttttgttcattggtagctcctttaggaatgacagtgctgtcggccatatctctcattttccgttggagtccagtaaggtcttggtttaacgaacgatacaacttagatagctgagacatggaacgcatgtttttgtccatgtctttttgagtagttgtgaaatagttatctactccacggcttctgatgttgtcgatctggtccattaacttattaatttgttgtagctttttcactgcattccgggtattagcgtctacatcaaaaatatacttctctacatttgccacgttatcaccacactccctctgtaagataaaaaatagaggcagaggttaaaacagccctctacct

SEQ ID NO: 2 - DNA, 252262 bp, bacteriophage
aaatgtatgattattctactagaaacctaagttttattaagatctggaagtttctaaaagatcaaggtataaaaaataataaattctttttaaaattaaatgatgaaacattacagggtgttgatccatatgatccaaatttaactgatgaacaaaaggtaagaatacaggttgaagtaatgactaacttttggtatttcttaagggaagtagtaagaattcctgaatcgggcggttctattcatttcatgttacacagagccaatcttggtcaaatgtttcttatggaaaataatattgatatgattgaaatattacctcgtcagaatggaaaaactatcggtgcagtatgtcgttatatatgggtatatcattgggctaccaaaaatactcatatgatttttagtaataaacaatacgccgattctcaattaaatattaaacgttttaatgatataactgaattattacctagttatttaaagactcatttagaccctaaaaaagatacaaataacttagcacaaatttcatgtgcaaaaaacaataataaaattgatgcaatgagtactgctaggactgttactgacgctgacaaactgggttaactaactatggctcagtataaactcctttaatttctggaacgtccttccaaggataatcagaagctaagacttttaaaagtaaagttcaacgactatcgaaaccgacttattagatcgttgtgataacgctagataaggataagggagtagagtagaatacaagctataggtattcaaaaaggggagcaccgtatttaggtgaagatatagtctcatctctatggtaacatagagcagttcataagagaacggtataggcgtagcgaacctatatgaaggtaacttgcgtggttgtacagtaccaattatatggttaaatttttagcccattataatagtgatattataatgaatccttcttaactgctggaacatccttttaggacaatcagcatccaagcattgttatataaataacaatgaaggttcaacgactatcgaaaccgacttatcagatcgttgtgataatgctagataaggataagggagtagagtacaactcaagcgattggagttggaaatggaaggcatctcaatgagatgaagatatagtctcatcttcatggtaacatggagcagttcataagagaacggtataggcgtagcgaatctatatgaagataaatgatgatgaatttgcatttttaaaatataatgatacggtatacgctaaactggtgcaaactggcgtattaaaactctcttaactgctggaaactcctaaagtctttagtaccaaagtgtaataatctaaaggatatatggacaatcagcatccaagcattgttataaataacaatgaaggttcaacgactatcgaaaaatataatttgtattatattgagtagagtactttcaagcgaaaggaaaaggagagcatgatgaaggtattaaatactggagtgaagatatagtctcatctctatggaaacatagagcagttcataagagaacgcattagacgtagcgaatctaatggaaggtaattatgagtgctgcaccagcactatcaaaagcatcagaagccgcacagcgtaatggtactccttacggaaaattaattacaacaactcctaaactattgggcaatacattagtaataatgtaattgaatcttccttaactgctggaaactcctatatggacaatcagcatccaagcattgttgtttataacaatgaaggttcaacgactatcgaaaccactctaacagatcgttgtgataacgctagttagaaggaagggagtagagtacagcctaagtgattgaggttggaaaagggaagcatctcaatgagatgaagatatagtctcatcttcatggcaacatgaagcagttcataagagaacgcattagatgtagcgaatctaatggaagataaatgaatgatcttgatacagaaatgggtaaatattgtaagggtatgattgatgatgcatgtccatttgatgaagcttggtatgattgggatattgatgaaattaaaaaatatattgaacagaactctcgaaatgactttgtttatttagtatttaattataaagagttaggacatgatgacaaatggtatcaaaaacaatgtcgtcagctcaataatgatttattaaaaattaaacgtgaaatattattggaatggacattggctaacgatacttcacctttttcagaggaacaattagcagaaattggacaacatgcaggtgaacctattggtaagttttatgtaatgaaaagatataaatttgaaattttcagtgaaatgcgaaatatatttaaaaaatcatggctaatcggtatagatattggggcaggtttgaatcgagattttacagtgatatctattattgatcctaaagatatggttcaaaaagcagtatttagaagtaataatatatctttgcccgatttaaaagatttggttatacacctagtattagaattttgtcctaatggtgtcattattccagaacgaaataacttaggtatctctttaatacaagatctactacgttcagaagtagctaataacttatattatgaagttagagaagtaaagggagaaaagaaagttgatgacccaaaaagatcatctaaaaagacagttaagactaaaacaagagtttatggggttactactagtaaagatagtcgggatataatgatcaatgagattcttagtaatgcagttaatgatactccacatgtgtttacaagtaaatatatttttgaagaattaagaacattagaaagaaataagaaaggaaagattgaacatagggatggaggtcatgatgatacattattctcatggctagtggcatgctatgctttcttatatggaaataatataaataaatttgttaaagtcatcagtgatggcgataataatgagaatgaagaaaataataaagatagagctagaaatatttatgcattgtctaaaattaatactggtaaaaaatcacagagtgagatattattagaaatgtataagaatgaaagtagattttttgaagatcataatgagaatgataataatattagaaagcaaaaaagaatgaaaagcctaaattttattactagtttaaatagataaatgaaagaatgtagatgaaaatctacattcttttttatattgaagagaattactaacaaattcatatgaatttaattaaaattagttgacacatataggaggaagtctaatggctgaaatgatggatgaacaagaagcaaaatttttaacagatgaagatattgatcatgtaattacatctttatcagatgatattatttttgatagtttgaaagaacagattagcaatgtatttgtacaatctgatagtaatccagtatactatattacttattttactggtaaatataattatattatgaataaatattcagagtatgaagaagtatgtgaaaaaataaaagaaattagagaagaattttatgaaaaacttaaaacactaattgaagaaaaatttgattttacattaaatttacctgcattctttgatgatgaagagaagtttaatattattgggaacctttatgatttcttcataattagaaataaagtaaattcagttaatgttatctctggatatattgacaaagaaattaaggatcttattaaatactataaacctttaattgataaaaaagatcttacctataataacatcaagaagactattaataaagatattgcagtaattatttgtaaactacctgacattatttcaaatctgactgtggaatctggttttgatctagtacagctaatgatagatgatgaacaagaaattacgaatatggttattggttctttatttgatgagaatactgaatatattaatattggagaaagctttattgataatattcttaatgctattaagaaaaatgaagtatattatttgcaggctagaactcaattagtaaataaatattcagataaaaaataaattattggaggactatataaatggcaattattgatagtaaaaataatgatatgattaaaacaatgaaaggtcttcaagaaagttcagaatcactattaaaaacttttaaagatttaggtttagataaagaaaataaagaagagtttgaagaattagaaaagtctgctaatgaaattaagcaagaatttgatactattgctacgattgaggaagaagttaagaaatattctggctgtagtgcttttattaaacagctagaagaggttcttgaagatgattcacagagtgaagaattaaaagaaaaaattaagagacagatttttatgattaaaagtagttataattttaaagcatttagtgaattacaacctactttaaagcctaaaactttacttaataattataaagcattacgaaataaagctgaaaataaattaaagaataatgatactttcacatttaatacatccttttatttagaaaaaatgattaaaggagtattaccagatgatttgaaatcttactctagaatgacagcatcatatatttatgcttttattaatactgcttctcttaaacgtggtggttatgctatctttgttggatttttaattaacaatattaataatttagataaagagtatccagaaaaacaagaacttgtagataatcttattaaattaacacaacttttaaaagatgaattgattagtaatgctaaatggaaatgaaataaataaaatgagtaaacctatatattaaattatatataggtttacttattattaaaacataatattgaactactaagtcatgaaaggagtttaacaattgaaatataattttttaaagaaagttgataataaaataatttttgatggtgaatatatggaagtttatattcctaaagactatttttcaaaaggaattgctagttatcatggtgatatggtgaatacattaggggtttttaactttatggtttacactcaaccaaaagaatccaaaaataaaggtgagattcatctattaaagcttcctatggaaataaagtttgaatttacaacataccatgatatatctactaaattaagagcagacttagataaggacgattatagagtttttcaattggaaaaaggctctgtattcattgataatgttattaaagaacaatctgctgaaaacagtaaaaaatttatttacctacttcatggtggaaaattacctaaatcactaaagtacagtgatataattgacttatatcatgaaagtatctctttaaataaagtaaaattaaataacccatcagtaatatttgaattaatcattgctgaactatgtcgctatagaaataatacagaagttccatttagaatgatgattggtaaagagaatgctaaagtatccgactatgactataataatatagctcttaagaaattacctgctattaactcaacatttaatgcaatgacatttgaagatattaaccaagccattatatcttcaattcgtaaaactcgtaataatgagaatgaaaatccatcacctgtagaaagaataattaagtactaaaattttcttatttgtaaaagaacatttaattaatgaaataaagatttctgtaaaggagagataaaatggctactgaagctagtacatcacaatcaatttctactggtactgaagtaagtcctacttggttacacccaagcgttacaagtgtaatcaatagtgaagagatcacttatcaaagtggctctggacaacaaaaaatgctttctatctttacttctgaaaaaggtgaagataataaactagtactatatactgatcctgatgaatttattgccaaaactggtaatccaaatcttaaaaaatatggtcaatcagcttataacatcattaactggttaaaggctggtggtgaagtttatggtatgcgtgtaatgcctgataatgcaggttttgctcatgcattcttaaatgttctttctaaagttgatactaaaaaagtcaaggataaggacggtaatgctgtttcctataaaaatgttacattgaaaccagcagttgcttattcagatgtaaataatgtatctgaaactctattaaactatgaattaaacaaagatagatctgctgatgagactattgatggatttaagaatcatttattatttgcagtctatcctacaggacgaggaagcgcatataataacttagggttccgaattactctaaatacttcttatgatgaacaacatgatttccgtgtttataattttgaagtaattagatatgatgagtataatactgctaatattattgaaggtccattttatgtatctttaagtcctgacgctctttcttcatctaatgaaagtatgtttattgcagatgtagttaataagtattctactcatttaagatgtatgtttaatgaagatgctttccttgatctttgtcgtactattaatccagatgtttctccatctaagattgatccactaacaggtaagacaagaactgttcgaggtgtagttgatactttctatagtaacattactaagaaatttgaagatactcatatttctttacatcgctatgatactaacggaaatgtcatgactgattctaatgataatccaatcttgaatattattgatgctggtgatctaattgagcaatcaattctattggcagataacacttatcgtaaacgtatgtatgaaagatatcttgctggtatcgattatatgaaacaagtgttcaatagtattgagaataatgattataatacaatcattactaaattgctttatactcctgatggtgtaactcctgaatctggtttaattccagaaatggttgaaaagctaaatggttatcatactactattcaaaaccttgtaacagtatttaatagtagtcatttagaatcagatttcaatcggattgttactgaaaatactcttgttgaacaaggtattaaagatattatgagtctgattggtcaacttctaagttaccataaagcattagaaatgagttcaacagtccttgatctagatgagaaagttaattctgtttacaacaagttaaatcttaaagagattattgatatccgtgcagtttctaaaaaagataagattaatgaaatttctgacactattcttactttaaaaggaactggtgatgaagatgaacaagcaagtgctttaacttctattctttctgatattaaaacaactattgattatcttcttatgatcatcaacgaaaattctctatctgctacagatattaatcaagcagtaactcgttataatgcaatcattgatatgtataatgctatctttgatccaattgtatctaacgatgcggctaaaactattcttgctaatatttataacagtctagatgaattagttgcagatctttataatatttgtgaacttgctatcgttaatattgatttacttattattgatgatattattagtaagaaaattgcaaatattgtatctggtattgttcctgtaacatatactaatactgaattgtatgcacaaaaggtttctacaactgaaggcaaagctgaactattatctagtattcgtaagaatattgataactctacagctgttgtaactgtgatgaaatctattgtttatactactcaacttcaagattttaattctcctgctatttttatgaatggtagtgatggtgatcttgatgaaagtaatcctacacttaagagtaaaactatgttgagcctcctagttaaaggataccaaggattaattgatgatagtgttactaatcgtaaagttgctcctttccaatttgtattagacgccaactatccaacagatgttaagaatgcaattgttacattggcgagagatatccgtaaagatattttcttctatgcagattctggtattcaagctagtcctgcagatgctattagttggagaaatgcttctttcaatgtatcttcccaattccttggaatttatactcaagacttcgtagtttatgatgagtataatggaagagatattaaagtaacaccaacttatttcttagctactaagattcctagtgttgcatctcaatatggattgcaatatccaattgcaggtaacaaacgtggtacaattgatggatttaaatctattagttatgtaccaaatgaatcttataaggaacaattatatactcgtcagttgaactatgtagaacatgatagtaaacgtactaagtttggtagtcaattaacagctgatatgcaaagaactccattgtctaatatcaataacgctatcattgctcttgatatcaaacgtaatgttgaggaaatggctgaagattatcaattcgagtttgaagatgatgaaactatcagaacattccagtacaatcttaatgattatctatctacctacatttctaatagaagttgtgatgaaatttctgcaaccgtatatgcatctgattatgataaaactcaacagattcttcgtgttaaaatcacagttaagtttaaagcggttgttgaacgcatcgtaattagtattgatgtagttaagtaatacagtaataatgtatagtgtgaggataattgcctcacactatactatttataataattaaacatattgatatagaacttttatattatgagagaaaggtgaatgattaatgattaaacaaggtaacgttagagtttttgactcttcactggcgcaacagcaatcattcttcactggtggcttaaatctcaaacaactagcttttgacccattggttactggttatgcgtttattgtttggactaaattaccaaaatggattgtccaagaatatccaggattcaaagctatgacagagaagaactttaaaggattcactggtctagaagatatggaacttcagacacaacaataccaatatggttttgctaacaatgattataacgttgcggctggtattactaaaaataacactgaattcactcttcgtcatcaagagtattctggtagtcctattaaaaatatgtatcagttctgggtttcttctatttcagatccagagacaggtattgcaacatatccaaaagtatatggtatggaatatgcggctaaaaaccatactggcgagttaatgtatattgttacacgtcctgacgttaataatactgaaaagagaaatattgaacaagctgtttattatactaatgtaatgcctaaacgtattccattatctcattttgattatactcagggtgaacataacctagtagagctcgaaattccatttagtggaaatatgcatatttcttctaaagtagataactatgctaagaaacttcttgctactacttactcctttgttactgctggtctatttgatccagaaaaagctaatgttggtggacgttatctttctgaatttaataatagtgctggtagcgtacaacaaggtcttggtgatatttaataataaaataaaagcatatatcataattgatatatgcttttattctttaaattaaaatcctcctcctaagtcttctccatctcccacagaattatttgtcttaagggcagtttcagtagaatccattagagcatcttcatataatttgtccattaaatcccaatcaatatttggaatcatatgtctaacgattttcttcttgaaattagtctttttagatgaatctgcatctgtttcatctatataggatgatgtaataaaatcaacagtttggctagcattggaaatttgatcattaatattagttagattaagggatattggaggtggaaatagcacttcaatatcattaacatcaatataatcttgactatcttttttcttctgcttatcatctttatcttttctattgtcattcaaatgatattcattacgatataacattctaattaactctgaaaagctttcagagaatgatgcctgatctgatacaatagttcttacaaatgtagagttttgcataacaagtgatctagcaaaatcaacatcttgagaagcatcaatatagttagcaggtactcctgtaccatttactgctgactttaataagaattgaaggaaatcgctgtctgcatccacgtccataccgctcaatgtatcaaaatctaaaggtttttctccatctataagaggaatatagtagtcatcaaatactccaatactatttagaattgtagaaacactttttaaaatatctgtctgaatttcttttgacttaatatctttaactactccttgaatagcaccttcaatatctgcatctaatccggtttcaacatacaccaaacgtttatctctaccacgagagatcttttgcattaattccgtaatcaaagtagcaagatataatttagcaaagaacaaacttcttgctaattttgattgtccatataattcatcactatcagtcataaaatgtactacttcatctggtgctagatacgtgatcttaactttcttctcagtgatatatttttcctttaataacgcatagatatagtctttgaattctttattatctttaatgaattcgttatctatcttttttgaaatccctttaataaacacattggcaataatttcttctctatccttatgatttgattgctcaatatccactcttgaattgaagaaatcactaattgctgttgtacctgaaccctgtgttgcaatctcatcagtcttttcaatatgaatataaccaaaatttattccatctacttcgagtttaataacattctcaggtgaaagcattcttataatagaacccttaataccaaaatgtgtaaactcatcttcatcattttctttatttttctttttgtttaattgagataatccatccgcagataaattaagtaaagcttttcttgggtcatcctcatagtcaatatttttatttataacacttgagatttctgatttaatctgattataattatactctgatttctcattcaaattagtttcgaatagcatttttaaatctttatcatcaatatcttctttcatgataaatctagaattttgcggttcctcattatttgaattaaataaatccttattatcttctgtcaatagcattttattaaattcttcatcatactttaatactgcaacaaaataatcaccaagtgttaatgtttttcttataatattctttgctctcttatttaatttatactttttaacgagaaagttagtattctttataacatcattacttaattcatcttttactttatctgatttataacggatatttaaagagtctttagtcaaatcatctggtgacatgatactatctctataaacattaatacactcagctaattgagggatataagagtagataatactataatcactatatctagagattctttctttttcaaaacccattaattgtgataaattctctttggataagactttttctaactgacctttatcaaatttctttttaggtttttctccactcatattagcatcattattaaattcagatgcatttagaaagtccatcatatttggagtagtataagatttattttgatctataatcttattaatagagttagatatttcttttgtatcgttctcgaaattatcagatgtatcagtaccaaagatctgattatttatcttatgttctaaaccatcaatttttcctcttggatctgccatttcatcacctttttccatttcaacattataattaaatgtttttctttatgaaaaaaataaaaaaaaaataaagcatgtaaacatgctttattctgctatatcagtaataagtatatactgttttacctcaatattatttgaaggaacaataatctcgataatatagagattttcatctgaattataatcatataatttaaagtagatatcttgtttagatgtcttagtgcctttgaatccaactaaaaatttcttattataaattattctaatataactatcatcatcttctaatttttcatctatagtacaattaccagtattagggtagaaataaatagaaaatggtgaattcttatattcttttattacctcggtttgatcactatttaattgaaattctcctaataacttatagttttctatcttaaatctattagaatcatcaatgaattcatatctttgttctactaaaggtacgttagtgttaaattcaatataattattatctattcttacttcagttatattattcttatattctttaaaaaaggcatagtaatcagatcccctaatggaaaatttacagttattaattatatcttctaaaaatgcattctttttagaatagataggataagcagtaatataaggagttagttgttcatgaccattagcaattataactccattaatgtagttataatgttccctgctattatgtacctttttcatatattgattaagatcattaagcagtttacaaaattctttaacctcattcgcatcagataatacaatcatattatcactcctattataatgattccagtagaatttatctactggaatcatatttatttatttatctttccactgaaatccaatatttaagttcacttgtttaggacttaagatagttattgaatcccagtttaaaccaaatttaaactcttctttatttgaaaatacttttacattcaaatcttttaagttaactaaaaatattctacttgtacaactatcataatttaccatccatgccatatcatcatctcttacaaggaaatagccatcactaatatctttaaactttaatttttttggctcgtctttaataatttttaacttaattgacatactcattccccttttaatagtcctctatcggttcaccttcataaaatctaaaatattctgtagcataggtttcatagagacctttatcattagtaataataatttgatttacaccagcattttcatgcactaaataaactttatttctagttaaattaaattcagaagtctcagctactaccaaatcgagatcatttaccagcttgttataacaatttccctttttcataatatatccctcatttacttgttatctgttctttatttttaaattgagatttctttagacgcttattttggtgttctaataagttattatgactgttaatcctaatgttctcatttgataagtattcagtttttgttcgttcttcattatatttatccattaaacttcgatatttatataataatgaaaaagcagcaacattaactatcataaattccactcctagaaatatattaatagtatccaatattatatctcctttagtgttttttactaactaatgctctcttattaattacctttctatgataagcactattaagtttgtaataacattctttaattactttagcatcatggagtgcattatgtttattttcactaaatggtaatccaatatattcttctcgattaatatcaggatcaatgtctaggattttaaatagagtacaaatatcaaaaggaatataattaatattatctggaatatcgaaagcactaccaaataaattattaaataatatccaatcataagataaacaatcagaccacatgtcaatgtaatcaaactgttctaaccatgtttctaatgcttctttaatttctttagaatttcctttcatcgttacagtgtaatcatctctattagacttaaaattattaaattgattatagccattgtatagtaatttatcaataacattttcctgtaaccattcatctacttgatctttgttataatcattaaattcagcataaaaagatcttccattttcagcaactagtccaatactaataagactggtctcctgatgaagaccagtaaattctgtatcaaagaaaatttttgtcatttatatctctcccttaagatacttgtaattgtttttgttgttttaatttttgaatcaaatcacttgttgttggtaaattatgccatttattaccaaaattgatataatccttacttgaatagtcatcaacatattcttttgagatatcattaccatcttcttcaataacgactctcccataacatgtttcaggtgagatattaaatgcttgaatgattgatggatatagagagcttaaatcaaagtcaatacaattctcaaataggaatttagatttttcccctaataactcaattccgatattatcaatgttatttggattagctacaaatgcacctttaatttttccctcagtctgctctctaatttttgctctattattagagatataaactcctttttcacgatagaatttagaagcaagatttcgtaaacaaattgttttcttcattgctttctcaatacgtgtttcagttaacattgctactgaatagattgcatcaacatctctattcttttcttccatcatcatcatcataacagtatcttgaatattataaaacataaatttcttataatcggtaatatggaaagttttaaatccttcttccattacatcttttgttagtcctacttctttttccccaatatagtccaaactataagactcttctttacccataccttttcttaagttagcatagaggttcattgcgtctagatatactgaataagatgtaacattcatttcattaccattatcagatggatcttggttaaatgtatcttttctatagctaactctcttatatttaaattcttttggacacataatatcttctggattatgccctaatctcataattctattcattaaataaggattatcgaatccatgtccattccaagctaatacaaaatcaggtttaatttcaatattaataagatcgtagaatcgttttatcatatgaatctcactttcccattcttcaatgataaaattcatctttctaccttttaagatctttttatatctttcttctagttcactcttaatactatctaggttactcattgtttctacataagtatcatgattatattttaagcaaagtgtataacaattaagattatccatatcaataagtgtcataatatttactggtgcttcagcttcttctggttcagggaatccaacaattttctcaatatcaacctctatatcgtataccactttagttaaaccgaagttatttttatcggctgggtgtttctttaaaaattgagaaatataataatcttgaatgtttacatctgaaccatgtaaacgatagtctaaatgaattcgatttaatttctttccaattccatagccaccagattttattgtatcccagaaataatttgtaagattttgatcatttaatgtagtgataattgacttatataaatctttcgcataacatttgattggaagtactttatctttttcaatgtagtttcttagttttccatcccaatattgtggttttgtaatgtaatattcaatgactggtttttcaattgtttcacaacgcttattaccattttcatctttaacaataaatagtaccttatcaaaaccatctttactttttctatctggataaaaataatgtgtattaatcatctgaaccataaatttataacctcctcaatattcatcaataatttagttttccatttttataaaaagttaggctaaatcactatattcttcctttctatttatgtaatcatttatataatatatatttaaagtgattatgtgaatttaatatccacataatcactttttattatctagtatttactttattagcctttagtttaattaattttaattttccgtctgaaaattcaacagtcatcctatcagtttcaccattactgttgactttaataatatttttaatactatatccataagtagtagcattacttacttcattaattacctcttcctctgattttgcttggttgaagtatatttcatcattttcatctttactaattacaataaagctattcttttcaattttttctttattcattttatcttcatcctttgataaattattttaattactctcagatccaaatttcttttttagttcttcatatctttttctatctgcttcttcttttcttcttagacgatcttttctaatttgctcttgctttttcttaaattctttatcatactcttcccaatctttttcagtaacaattcctctcttatcaagttcatctctaatatatttatcattatatagactatgttgtgcttgtatttttggatacactctaatttcagtatttccaaattcatcagtcttttgccgaatcaaacaaactccaccatctttagtagcaatagtaatatagtcggcaaattgatttgctgaaacaaagccaattacttttccttctaaatcattagtattttcgataaaatacatactattatacctcttccatttttaatatttttacgaattgcattatttacatctgaaattcctttattttttctgaatatattttccttcaatagattgttctaaatcttctttatttttaatatttccaaagaaaaattgaccagcaagatcttttaaattatatactttattcattattaatctcctaacattcactacattttttacatactctataataataaaatttacctaaatctattcctacccagtattgacaactgtttcccttttgtatcgtctcattacagaattcacatataaaattttttcttgattctctaacttgtctaattttcatgaatggaggataggtggggattcttcctaaactctcatcattattataaaattcactcattatttttaaatagattaataaaattccaaatatccccataaaaaacatcatttaatattttaaattcacgcatttttaaccatctctttcttcatagttatataccaataattatacttattatcaaactcaatatttgtatatggattgttatcaaaataagacacaatcatatgaatcaaattattcccataaacattaaaactcttattcttatcaaagatatatttatatactttgcgacttactttatttttctttctccagaaatcaaatctaaagaattcgtctaatgatacatcagcattagactcagatatagctaattcaacaccttgtgatggatattttactaatgcattttcaatataggatattacttcattgactgcaagcttataatacttgtgtttatttttattatatctttttctttcaaaagcctgaaacttcttatagaagaagttacaaggcttttcaatgagaaataaaagtatactatagtacaactttttatattttttctttcttttttctttattgattctttttggtatgtgactcaattaaattccccctagtacttataaacaattcctttattttgcatgaactcttcattatctgtatctatattatgaccatttaataaaattaaatcaactggactagaatcaaattcattgttatgactgatcacaaatacttgttcgatacctaattcttgaatttgagactcaagcaatgatgtatatagtcttctatttcttgcagataacgtactatcaacctcatctaaataaagaatattatatttagttgattccatcattctttctatcattcctagtgatagcgaaataattgttaatgatgtttccccttgagaagcttctttaatatcttctaaaaaagtgccatcagatttaaacacattaataaagaaatcagatgcacttatatcaaatttaatcttaaattgatcaccatatgcgatatctaataagttattagctctcattgctatatctttaagatagttatcaataaagaataatggaattcctttctttggatcaagtgcttctttaataatcttataattattataattttcctcaatttcttttaatctttcagtgcaatcatcaataatgattaagtctctttgaacttcttttaatttaatttctaatggttcaagttcagatcttttacttctcaatagaagaagattatcattaatgattttctcatttgctttaatagaattatagatgtttaatttcttttggtaatcagcttcttttttatttagctcattagtattattctcaataatacttttttgatttttaatagtttctaaaattgctaattttgttttattatttttaattttcttgtctattgattttttactagaaattagagtatcaatttcactcttacactgaaaatacttttccttaatttccaataattcctttttagcctgttcaacaatttcattttgcttttgtgctgttttaagatgagataataaattttcttttttatctttttcaattataatatccacttttacactagctatttcaataatatccttaattgaaaacttttcttggatgtcactaatgctactttttagaatatcaattatattttcctctgttatagcattatcataaattaatgaaattacttctttattagaattaattttcttattcaatctcataatatcttgagcatagttccatctatttcttaattcttcaagatttttctgatcttcaataatactattttcaatatctattaattcgctaagtaagggttctaacctagaataatcattatttctataatctaaagctttaacaataaaaggacatgtatcaattatacaattacttggtcttttctcaagtgtttcaagtaaataagaatttgactcaattttattagtctctttttcaatagtatcttttctatttagatcaacttgtaatttttcatcaagcctcttaatctcattaggtatagtaattatttcagaaacattaaatgattcaatgatatgactagtatgatcagacttaattgattcaattgtttcaacaattccatccaagatatattgatattgagttgccatttgaactgttatatctagatctgaataaggactatttaaaattttcttttcatactgttcaattaatgaatctttattttttatttgttcctctatatagtcagtatcagctttattttcaatgatactatttttagaagtaatttcatttcctagacgaacgatatctttttcaagattatcaatctgattattgattaaatttagttctccatttagttcaacttctaatttattacattccataattgaattattaattctatcaatctcataatttttaagatttggatatctttcataataagtatccaaaatcttttcaccttttataatttcaatttgcatacctttaatggtattatttagatggttaatataatgatcataatcatcaaagccctcagtatctagacttacttttaattcgtctatctttccctcagttcggttaatattcttatcaatattctcaatctctttatttaattcattaattcttttggtcaatgtttcatttaatttttccaagttatccttggaatctaatttttctaattgacttctaatgcttttaatagtacttgtaacattcttaaatttttcattgactatctcaaatgcttctaaataatcatcaatatctggaagaaaattgtttatatatttcttcctatcagcagtttttaaatctacaaatgtagttacattactcccaagtcttgctactctaaaataatcccttgttagattaaattcttcttgaagaattttttcaaatgttctaataccgccattttcattcagttcttcaccattctttgaaataaatgatttattaccactactattaaatttaccatctaccacttttgcatagtaatgtctaataatgtagttatcttttccactagagagatgaatttctttttcacctttcttgccatcaagaatgatagattttctctcatcattagtatctctataaggagttaataaacttaaaatagtcgttttaccagaaccattatcaccgattaaagcaataattttattagtagattttgagaaatcaagctctagttctgttttacctaatccagcataaattccagcaaagttaacaaatcttgcataagtgattttcattctctcactctcccataatatctcatctttcattttcatgtttttaaataatttttttatttacaagaatataaataaattattttattatatatcagactgattatattcttcaaaattatcacattcttcacattgtattataagtaatgattcgaattcatcatcatctactataaaactaatattgtttgatccacactcatcacatctaatagtaaaactcatttaaatcactccatttttcttttattttattaacttatttataatatattctttaatctttttttatttttagagaattaattataataaaacaaaattataataaaataaacccctcaataaaagcagaacaatattgtttaattaaaccaaggatatcagataatgatatccttggttattttattcttcatcttcagtaaattctactacatcataaatatttccattttcatctcttgcaatgtattccccattttcttctgtaatctctatttgcagatctggtaattcagcatcttctataatattataatcgccatccagacaataaatatttttctccatatctactacatattgatagtcatttattttttcctctattactgtctcttccttttcagaattgctttcattttgttcttctttcaatcttgcttctaataatgcatctacttcttcatcatttttctgtgatccagaaatatcttcagattcttgtttatttataatttcactaaattttttatcttttttattattaagaatataatcatgaacaccagcaacaatttctctaatatcagagttatcgccaccctcttgatttctttgatttttaagtgcaatatcagcctcagttttcttagcatttacgatttgctgaatgatagatatcttaccagttttaagtgaaattaaattagaagtttgtttttctataaatgtaagagttccattactgccactatttttaactttatcataatgctcttttgtttcatcatataattcatcgattttttctaattcattctgaagaatacttaattctttagaaatatcgatattaatattatcagccattttttatcacccctataatatttaatactaatataatgttccgtattaaaaagattttcaagtatatattattactgtgacgatatcgaagtaatagaatttcgtcataattcctacggtatcattgtagggtaattttcttagatattgttcatttacacggactcaaacatgttcccgtagctgtaacaataagaaacacaaaaactagtaataaataaggtaataaaagaatggttggaaagacaaaaatattcatcaggctacataccacgaaaagtgtattgaacgaatgacaatacccacctagtgattatagcaagatctttcaccattctccgtatccttataaagagaaaaaggattttttaaaatggagaggagaatacgctatgacaaacacagttgagaaaaatgattgtctgggaaaattccctattgatgcagtaagaattagaagttctattatttaaacatatacgacgactacttttactatgggtgggggcaaccccacccatagggctttttttggtcaatgtataaagatttcgtcaaaatacttaatggggaggtttttgattgaattggtttaaaagaatgtttatggcaaaggagaaggataaggaaattgattcactaagaaggatggttgaacagagtaatgaaactattaaactcatggatggtgtcataaaaagattagaggataatatgactaaatccagacaagaatcagcagcaactcttcaggaagaaaaagaatatcaagatcaaatgaaattggaatcagaaaggatgcgggaatatgaatatattcaaaatgctcaaaaagttgtttctacttatttaactaaatatctagatcgttttaatctaattgaaaatcgtttttcacttgctcataatatagatcttctttctaattctgatgacttaatgtttaaaattgtacaaatgattaaattgtctaagacaagtgttgaatttgctactgtttggaacaatcatgttataagaattagtattgataatgatgaagatgatgtatattatagtattaatggtggaaaaaatctaagttccgacattgtaggaaccaaatttcttactaaatttaagaaggatatccaattagatatattgaattttccatgtgttcagacaaataagatttacgaagtaactggtaaaaagtacaagtatgtcttagctaactcaagaagagaatgttattatatacttaaagataaagagatgaaaacaaaaataaaagaagttagttttgttgaaccaagtgcatatacacgttctattagatctagactagtatatgtagtgcctcatcaaacttaatgcttataagagtaaagtcttttatagactttactcttttttttattccctagttagagaatagattgcttgtattgcttcattcccaatttggcgggagtttcgacccatttgatctaacatatttttcttttcccatattagtcgttctgcttcttcattagcttctttactaaatactccacgtagagatactgtatcacccaaaatcttccagtagattcgctacatctactgcgttctcttatgaactgctctatattactatagagatgagactatatcttcacaatataattgtgccctccgtttccatttaaagaggaattataaccttattacggaatacctctaccgcttggctgtactctactcccttccatctaactagcgttatcacagcgatctgttagagtggtttcgatagtcgttgaaccttcatctttaaatgaattaaagacgcttggatgctgattgtccatataggattttccagcagttaaaagggttttactacgacagtagattattatcttttataggtaaatactaaattaccacaatcccatattcttttaaatctagttttatccatgatttcaaattcagtactattatcactatataattttggaaatttctttttgagattagactttctataattaaatctatggaatcgttgagttttttcaacattaacataccaatagttgggtttactaatatgacttaattcaaatttattattgatataaacattaccatctgaccagcgtctatctgcataggttattaattctttccactcataatttctctcgaagtatttgagaagtttactaaaagcacctattactctatagtccatatcggtagcgaatcttgatagttcaaaaatattatcaacactatttctacctagactttttctaagtttactaaaagtcataaccgctacaagttcatcgccatcttcttttggaagccataagcctaatttaattgatgacaaatcttttccctgaatgtgatttctttctaggaattcatttttaaaattgttatcaattacttctacataacaatttctagcgtatattttagtagaattatttaattttagtaagtgtcttattttttcttttactatgagaggtttgttaacccattcgtcttcaaaaatttgaattagtctaatccctttactattacatttttctaatttttctaaatgatagtttcttttcttccccatttgctctgaatgccaatataaaccattaaattcaaaagcaatttttttggaaggaataaatatatcaatctctttaccttcaagtaatttcctgtcattacatatgactttatctacaactaatcctttaataaaagaagatagttctttttccatttttgatgaacttttaaatgcacaatatggacatctatttccattattaaagtttttaattgtaacttcatactccttattacaactatgatgtaacaacctaatcttcgttttattattacgatattcacctaataatgaatactcattatttgtaactaagctaatttttcttttaacctcatcagtagttagccttcttttaccagaacattgaggacatctatttttcaaagcataataaggagtagtcttccattcataattacagtcattacatctgaaaagtattttggtatcgatattgatatatttctcaagacttataagtcttccattagtcttttcttttaattccttcttaaactcatcattgctttttaatcttgatttacctttattaatatcagcacactgaggacatctactaccattatgaaatatatcaggtctaacctcatatatatttccacatagttcatgccttaatttgattttagtcttattgttaatatattcattggataaaactgtataggtattgttagttagtaatttaacttcttctttgaattcatccagtgtctttttgcgtggcatacactaatacctccaaataattaataattatttgtttatttgacactgtattcccttaaaaagaaataatattgaatttatcgtagtccccgcctaaagcctttaaataaccattataaggaattactgtatcaacaaaaagttcatcctctgcgggatagtcagggtatataacaggataatcaggtaagtatctatcttccagcttttgaggtcgtgtttcttttgttgagagaattctaattttacttggataaatattctatagtgataggtaaagatttgatataatctcctctttttcccccacttcacaccctacgtgcgactttcaccgcataaggcgttccatcaaaatatattattttgactatgacccttcgctccaatggagttacccatcttcataactactatggtctgctgactttctatataagagtatcaactataatttctcttatatagaatctctgacgttccgtaaatgatagtatagctataacttagatgccttctgccctatataaacttctattgtaccacactttacaatcaggtcgttcaccagtaccgtattactaaaccctgaatttatatagtataaaaaggttcgtgttcctcatcatattatagcaccgcccaccctatctattagtattatagcattactaatattcagatgacttcacctaacttcatacaaatattttatatagtttaaaatagatgcatgtaggagtattagcgacaagtcttcaatgaaaatggtcatatcttttacttgttctcatttacagtttagattataaaatctactccatttcacattaaatgcttataggagaacgtcacatacgatactgctctattggatatcttgttacatatacatgtttatctttggtaatatcaactgccgcaatgaatagaatatcagttaatgtaaagttacgtcctagttcttctctatataatggaataggaatttcattccccttatcatctttaatcattaaactattaaaacgactttcaatagacttaatgtataatgagatcatctttttaactgcttcctcagaaaattgttctcttatattactaatagttatctcttttccattatgcttaaatttactaagttctgattcacgttcaagaatataatcttggatatatttaagaaagaatggataaaattctaccactaattgtgataggggaatacctgtccatccaaatctaatagggttatccttccagctatttgacttaaatcgtggtgctgagattacactacgagttgcataatcaacagatttacctaaagagttttgatggaacataccatttttaccagctaaagaggatgtaaaatagtcatagatatcatataaaagagtctgaatagatgattctgttattactcccataaaatcataatcttcacccttagaaattgattggctatacctaattaatttagcatatttgtcattcacttcatcaacagctttaatcgtatcattagaagattttgagggattataatctctataaaatgctggaatcactaaatatttgtcaataaatatatcatccttaccaagtttatttaataatgtaagataacttgttcgtctatcagttccagtattactaaattttaattggtcgtaaatagtataaaaataggtaactccagttttaccattatctttatcttcaactaacttgccgccctcaactttaaaatatttctttccagatagacaatctgcaatttttcgatccatagaggttagaagcttataaattactggatggagaaattttctctttaagtctatataaccgaaaattatttttctttctttacttcccggataaccaaaaatactagttgaaaataatccatcttcagttggtatatttcccatattaaagtaaatcggatttgttacttctttacatgcatgagaagtaataaatttatctatatttaatgtatctattttcatttaaatttccctcctattattataataatttgttaacggtttaagagaaatgaacaaaaaaaaaaatatgaagggattaaccttcatattttatttaaattcaattttttcatttcccaatggcataattctaatactgttactaactgagtcgtttacaataatacaatcaattgatctattatcttttaaataaattagtcttttaatgagagttggttttttaggatcagacattttatttaatgtatcaagcttatttattacatctttagtagtttctccgcataataattctgattttttatatcctttaacaatagttaaataaaagttttcatttaggtatttcatatattagtcctttttattatatttttgatcaatgattatatgattcaattgttactgaaatctctttaattccaaagcttttaatagtatttttaattctttcaaattgttcatcaatattatcaatattaatatcttggatgtttaaacttatagaaccactatcaaatttcttttcaattggtttatttaaagattcattaactatgtgagttggtgtaattccctttacattatccttttcttctgtataatttaaaggttttctaactccatatctaatttcttcttctggagtcatttttctagtgattacctcaccatgcatactttcttttcgtggtctcttacctctaatttttgaaccatgatattgtactgtttgatattttaccccagtctttttagaaatatcagaataagacagatcagtctctccaattaatctttttgcttcttcaatattatattgcccattctctcttcccattatttttccccatttctatttaatatttatatagttttgtttctcaaattttataattctttaaataaaagataaaataaaataataatgattattaaaataattccaaagggaatgtatataataggatcacttatatgaagaattgtactacttttatcatcttcatagaggtagttaacaggatgtgtaggacttaataaattatttggactggtaggatttaaaggacttgttggattagcaggatttaattgactagatggattcatcttattctctcctttgtagacaaaaataaaaacataagagacttataagtctcttatgtcatgttatactgctttctcttccgtttctggtctttcaatgattacatatggaactgcgttaaatccttttttcattagattttcattaaagccatcaatatctttattgttataaccagttgatggaatataaatatctacttcttcaaaaccatcattacaattttctacaatatcattaatatttgataattcatcttctacaatcatttttacattctttagattcttaatataatctgatttcttttcatttttcccaacaaaaataatctctactttattagaatttaagaaagtttcaataaattttctttttccttctttggttccttcacttgttcttgttacaacatagattttatctacgaatttttgtaatgataatttataaattccttcacacattttagttggcatacaatcttcataaaattcatcgttatcatataatgaataaaatctttcaaataattctttttcttcttcatctgataatacaagattttcttttcttaaccatttatttaaatgaaattctggacgtgatagtactgtttgataatgttcaaatgtaccaaattccaatccttctagtttacttaaatcaaagtattttccaaaataatcagcattttgctgaatcttatgaacccataaaggactaatgtcagttaatacctcatcgcagtctgtaacaattgaaaatggttctttaatagaaaacattaaatcctctccctgtaattataatacgcacgaaggaatattagaataataccattatattctaataatataaatgcttttagaatgttaagatattggttggaaattgtgtctgcttagttgtttctagtattttaaatcctaaagattctaacataatcataccactcttaatatggtcgttaaccatcgtttcaatatcaataaatggagtaacccactcaggtaattttttgattgattttggtagacacaggattgtaaaaccatacttagaaagattttcattatcataaatagtttctttaatagttttatagacatccattggtattttacctgctaaatcgtttaaactctcagttgttaatttaattagatttactttggtaggtaacacaatttcattatcaggaaataattcattccaaataatagttcctctaatagattgcattgcataaggattagcatatgattcaatttcattagccttagatggtagagtataagtaatttctccattcattagcgaattagcaatttcattttgtaaatgaacaaagttcccaaatactttacttaaatcaattttatcagaagataaaatattttcatctagcatgtcagtaaagtagtctcttacatttttgtttacacttacttttctaatagctaaacctttaatatcaagtttaggcttttcaaacatacgaccttcttgcatgattaatttaccagcataacttttcttattacgagtaagcattagacgtttatagaaaaactcatttttcatattgataataggacgtttttcagaaggaatatttagttcagatgtcattttccaataaacattttcaattacctttgccaataaatatgatgcaatattaacaacacttactttaccttcatccgtctcgtctacattatctgggtaattttcttttaagtatttataaaatggatctaacattaagaagtttgagtcagtatctactactaatactgtttgtctcttttcattctctgcattttcataacgatagaaacttaaataattatataaaacccattcttgaatatatgtccataacatttctagtgaatctttaatatctttaggtggatcatttggatctaaaaattctttattaattacttttcctaaaagattagagatctcattattacctaagaattcataaagattatttttataataaattttattaagtgtttgttgatccattctctcaataatatctgaaagaacttttatatctgaatcatttctatttctccatttacgtagaagatattgtaataattctccactttcaatatttctattaataatatgtgtatatacatatttctgttcttgaatattattaatgtatagaagaacgtcatttagattttcaaagtgaaagttattagacataaaattctcaaatgcatttacagcagtcgtaataataattacaccactatatgtaatacttggaccaaagttttgattaaagaagatactatttttctcaactgttgctccataaaatgagttagcaagaagtttaaaggttttttgcattaaatctaaattattatattccgttctatcttcatcattaacatgctcaaacatttctttttttactttcttacgtgataccagcaagtaatcaaccatatcagaaagtaaatttacaccttcattatgttttctatagaatgctccgtaaccagtaattattggtttcttttcttctaaccattcagtaacacttaataaattttttacacttttttgctcaccatcattaaatacaacatttttaccttgaatagtgctattaatttccttgtctaaaaattcttcaatctcttcttctctaatatcaggaaatgaaagaagtaattgtttctttgcctgttctttatatttttctaagaaatttggatatgaatttacataatctttagtttcctgcaaatttttctcctcccaagtgtttatcaatttttagttattatttctcttaaaaatatctaagattaaaaataactaatcaatataataatatatttttaaaaaggtttttatttaaacaattaaatataaaagtatttatttcaaataaacatttaattatattaatctgaaaggaaagtgatttttaatgtcatcattcttcaacttactcactgagtcaaatactagtgatattattcttgagcaaacttttcaagaagctaacgtagttcgtatggataaacaaactcttaaaaaacgtttgcttactcaagctacactattagcggctaaagatgctaacgatccaatttatcaaaaatatgttaaagcggctaaacaaaaacgccacttccgttctcaaattcaacaaaaatatggtgctaaaggtcaagctaaagtccgtgagttccttaaacagcaacaacaagctaaacaagctcgttaattttcggatcatagaaatatgaatgagaaggattactattaatgtaatcagatttgaaagtgaagaataattttaaattatccttaagatctttaataagatcttaaggatacttatatgccgtttacatataatacttagttatttttaagatattaaaaaacataaaaagtgatgtaaatatatattattaacttgtatttttccatgtttcatgttataattaatcaacggagggatcatcattggaaaagacctataatttaaatgatattctattatcaaatgagtatgaaaaaattaaagaggatatcaaagaagaaataattaatgatatggcatctaagaaagtagagtatagcaatacttctgaatttgctaaaaatgattttcttaaagatgaattcattgatttagttgttgatggagaaacatatgaaattacatatggaaatctaatcacattattaattgttgcaagaccatttaatcactttaaagtaccaatgactgaagatttattatttgatctatctgatttaaaagaataccaaaattattatactacattgctagaacattttagttacagtaatgaaattaaatctattattaaagatgttattagtgagttagcaattttctctggggatattaacgtaacatttggtaatacagtttctattaaatcacttattgatttgggaaataaagtaaagagatttagagaactattacattatcgtttaccaaatgatgaggcattagagtttaatgatattgaggctattattaaaaagaatttagatgaaattatgaaaattctttctgaaactgataatatgctaagatattacattgattcaggtgctggtattaactcaaaacaatttggtcaagtattatcattagtaggttctaaaccggatttatttggtaaaattattccttatccaattaatactagtttcctaagaggattagatgtacggtctttctatattaatgctttaggggcaagaaaagctttaatcacaaactatcaacaagtaagaaactctggctatctaacaagaaaaattagtatgttattgatggatacaaaattaattgatttagatgattgtggaagccatgaaaacaactatctttcaattaatgttgagaataaagatgttctaaaaagattctctaaaagaagttatttaaatgataatggtgaattagttgaaattgatattaatgatgaaagtctaattggacaggtaataaaaattccttccccaactacttgtgcgtctaatgaaggcgtttgtcgtaaatgttatggtaaattatttgatatcaataaagatctaaatattggtatgattgcagttctactattaacagatccattaactcagcgtttattaagtgcaaaacacttactagagactcggtcttctaagatcgattggggaactaattttgaagagaactttatcgtaaacagaaacttaatttatcctaaagtttataatggaacggttattattaaagaagatgattttaaagaagatgaggaaacagaagaacaagtatttgatacatttactttaaaaagtggtaatagatttatttctattagttcaccaatgagattattcctaaataaagaccttaagaaacaacttgatgaaagcttttataatatagaagaaatgcaatttgaaattccattaaataagcttgatgaaggcgatagttttgcaacattcatcatggataataacgaattatcaaaaccattaagggaaattaaagatcttattgaaactaataaatatattaaagatcataatgttaatgaagtggtaaactattttatttacctcttaaatgaatcaggtatcaatattcagtctgttcattcagagttaatcattagagaaatgatgaaactagatgattcagatagaacacaatttaaaaatgataaaatgccggattatgaaatcttccgtattacagatgctaatttaaagggagatagtctatcaagatcattattatttgagcaagttaagaaacagctaactacactagattatgatacatttaataaaacaaaatcttcaattttagataaactactttaattaataaaaaacagtataaaggtctatatgatctttatactgttttatttttacatattaatgtataaataaataaaaatatagataacaaaatatcagaaataaatttagggagagattttatgttagcctttcaagatcaaaaagaattcagaaatcatattaatgattttacaaaaagacaagaagaaattgatgaacttatgatagatattaccgagtatataaaagaatatttatgtactaattatattattggtgaaaaattagttttagtacctgatgagcgtaaaattgatatttatttcttagaggaagttgattcattacttatgtgtagcattgatatttttagtatggttattacaggttataaaatagatcctagattattaaagaaacataaaaaaatgattgaaaaacagtataaagatatacatgacgctaaaaaaggacttacaaaacgtttatcatttttaaaatctattaaactcccaattaaaaaaagatatgaacaaatagaaagaattgaatatgaaatcattcagacagatattgtaattggctatataaacgactatatttattttactaatactagagatgatttagtcaatcaaatttcttatgatatacaaatcaattttaatgaagaaaatgataaatatccatttttaaaattctctagagagtatgaatttcttggttcttaataggagaggataatatatgataagagtacaaccaactagaattcttgttgaaaactataaagctggtgaaagtgataaactagagaaatcactatctgtatgggataaaactatttttcaatataccttttcagcatttttaattgatgaagatacaaatcaattattaattcctggaggttatgattacactaaattaaaaaagtgttttccaagagataagatagttaatgaaagattaaatgttgatccttacaataaagtaaccttttcactaaaatatcctcctagagattcaatacaacaagatgcaattaaatttcttttacaaacaaatgattcacagaaattcttatgtttaccaacaggtaaaggaaagacatactgttctattaactacgtatttaagtctaagaaattaccaatggtatttgtagaccaagagaacttaatggagcaatggaagaagagtattctaaattttacgtcagtaaaagaggaagagatatttcttattagtggtagaaatagtattgataagttaatgaaaatgaaaaagaaagagctaaaaaaatataagtggttcattgctattcataaaactattggtaactatattgacgataatccagataatattgataagttaatgaaacacttaggcataggtgttaaattgtatgatgaagcacatgtcgaatataaaaatatattctatattgattcattaactaatactgaaagtgtttatataacagctactccatcccgaagtgatccaattgaaaataaagtttatcaaaatattttcaatgatgttccaatgtataaagttaaagaagatgaaattgttaattatcacaatataattattgtgaaatttaacagcaaacctagtattgatgatcaagccaagatgaaatcaaaatacggttttgatacaaatagatggtgtaaatatattctggataatattaaatatgaagaatttatgaatcatattacaaaaaatattattgaaagagtaaataagaattttgataaaaaaacagtactattatttcatacaatggctggcaatgatgttattattaatgatcttaaagaaacttacccaaatatagaaattgggagatataattccagtattaaggacaaggataaacgcttaaaggaattagaaaaagatataatagtaacaacagatgtatcatttgggaaagctattgatgttaaaggattagagatacttataaatacggttccatttggatcaaaagttctaactgagcagttattaggtagattaagggagattgaaggaaaagaagtatggtatattgatcttgtagatattggttttgatagttgtaaaaaacaattaaaacagagacaaaatatatataataaaaaagcaaagagaatttatgaattagacttgacaaaatagataaaaaatggtataatcatatttagatatgattataccatttaaaatattcattttaaaagtattatgggggaaagaaggaagataaatgatcatcacacattatgatgcagatggaaaaacatgtttagttctagccaaaaaatatatgaatggaataggtagttatcgaatttgtgactactcaaatgtggatgaggtagtaaatgattatctagatgctattgaaaactggcaatgcactgattcagttttagtcattacagatattactatttctaaagaaaccgcagagagaattgaaagtttaaaacacttattcaattttattatgctaattgaccatcatccagcaaatcactattatctcaagaaatatgagtggtgcttactatttaaggataataccagtgcttctaaggaattatatcaatatttaaagcaaaaaggtttaatcaatatgaatgatgacagctatgatgaactaattgactctgttaattcattagaaacatgggattatgataacgagaatgctaagattattaatgatttatcttataacttaaagactcatgactttttagcaagattcttaatcaatccatctctcacattgagtaagaaagaaaagattattcttggaatgagacaagatgatattcaggcaactattcaaaaagttaaaccaataattaaaggtaaaacatgttatatttttgtagatagatatgttactgaaattacagaacatatatttgggaattttgataatgtagatgtacttattgctattaatccaatgaatcattctatctcatatagaagtagagatactagaaatgatgtttcaaaggtagcaagtgagaatggtggagatggaagaaaaacaactagtggtagtcctattagcgaagacgcaatgttaaaaattgttgatattttattaaaggatggtgctaaagattatgcaaagtaaaaatgaaatttcattgggattaagtgttaaaattacaaacaaaaataaaaatgcaaagattattagtctttgcatttctgatcttggaggtaaaaacttattttatgcagaatttaatgattattctgagcactttttagatcattatgctaagaaagatatcattcctaatttattatttaatgagaaaaatgattttattatagagagtaacaatcattttcacatcaaatctaatagtgatataataagaaaagaagtttcaaaatggctggcaaactattatctaaaacataagaagaagattaagtttattattgatgataaacaatttagctggctgttcttttcagaattaattgattatgaaatttttcctaaatttatgttatccaatgatacaattgatttagattctcttctagagttcctaaatattaatctatcaggaacatcattagagaaaaaatccaatgctattattagcgccaaagggaacattagtatttggaagcaactatttgatgtatatcaaaataaaagataaatttatattataatagtgtctttaaatgaaaaggaggagtagcatgaatacttattatgattattcaaatcagactaagaagacgttaaaaactaatgaaagaagtctctctaggaaagaaaggagggaattagcaaaactagaagaaagagaaaggaggctttatgataagaagcagagggaaattgcaaaacgattggggttcattaaatgatagatgtttttattcaaggtaaatttaatattaaaagattaaaaaagtatttccatgataatactaaaacgatgtttctaaatgtaaatgaaaaaaattatcttatagcatttgatagtaaagagcaaaaagagataaatactagggaattgagaaactgtatagaatgtctacaagatcacatggacaatgtaccattagatagctggacagataaagttgcaggtattaattatggtacatattttggacaaaatttatccttaagagtatatattttgtagattaattttcataaaaagttagaaaaaattaaacataaaaatgtatcaaaaaaaaaaataattagaaatatgggggaacacttaatgagcagactagacacagtagaaagaattgaaaaaactttattttcagtaggaaatctattctccgtgaaaaatgtaattcttaatggaaataaaggaaagaacgataataaattaaattctatttatacacgctcatatgattcacaaaaatattcagatagaagtacgttagatcaaatccaaatcagaacttctgatttccttgtattttcatatcatgattttcaaaataaaattaatgaggatatttttatcagctatcctcatatgatgaactttatgacaatcttaacatctgcttataatatggttaatgctgatgaggtttatcaaggaaataatattaatccaaaatatgcaaatttttctttaacaacaaatcctcttggtggaggtaaacaattagcttttattcctactattattcaaagagatcaagtatatactaatggtgttattttattccttggatcagaagattatgcaattgaattagatgcttctcaactaggcgctctttattatatcttaaataatttcaacctattatctgaaagctctactttgttccttacaggattaatgtttgattcagctgtagaaggttctgaaccatctgtcaacacatttagctctgcacctaaaaataatgctggctttaatgctaaacctaaacgtggaatctttggtgggaataatggtgcttctagaggtaatggtaatacattcggtggaaataagagcgaagaatcaagccctaaacgtaatgcaggatttaaaccgcaaacaaagaatgttactccagatgagttagaaagtgccattgagaatggaactgatctaaatcctcctattcctagtgatgacgatatcccattcactggtggaattgaagatgattctcctattgaaactggaagagagaataatgattctcctattagttttaatgatgtaatggctggagcaacagagatcgaagttcctgatcttgatgataaagacggcggcattaatttctaagattacaaagcaaagggtgaaacagaactatgacaaacagcaatgatttcctagataaaatctctcaaattagtaatacaaaagaaacagaaaagaaaaaaccttctagaaaaggacgtaaggttgaagtagaagtattggaatttgaaattgatgaagaaaaagacactgagttagcagtatttgttaaacagatagttaataaagctcagattaccaatcaagatgtatataatgcattaggaagagttgaaggttggaatctaattaatggactacgaaaaggtagtgttagttggggaagagtaaagaaatggtgtgaaataattggatatagggtagaaattactctatcaaaaattgattaatgtaaataaggatagacatatatgtctatccttatttttttttatttttctggatttgatttaattacagcatcttttaatttagagagtgtatcattatatccataatttacaccacgagagtccaagatttctttaagttcttttttagttgcttcttcaagatcttccattgtatatgctacgtcagaatcaatttcctctgtttcttcttctgaaatttcttcttgttcttcaactaatgtttcttcttcttgagactctttaggatcttctacagaaacttcttgttcttcaacagattcttccacttgaggttttggctgttcctgaattttttgaggtttttcttcttcataacgaactacattaaaacctagtttagtcaacaattcatactgacctacagtaatactaataggacggttaattggaccttttccaatagtaggaataagtttagagtcagtaattgttacacgaattctttgtttactcatatactgtatcctcccttaaagtaagtctagatctaataatgactctccgatggcttctaattcttcatcatcttcgtcatcttcatctgctaattcttcaatttctttatcatcagcaatagtctctttttcttcattaattaaaatttcttcaagttcatccaatgcttcatcaagaataatgtcatcatcttcgtcatcatcctcaaaatcaagaacttcttcattagaagttgcttcttctaattcaagttcttctaatgtaacttcatcttcttctttgacaatctcttcatcttcagagatgatttcttcatctaatagttcttcagataactctgcaccttctaatagatcatcttcgtcatcatcatccatatataaacctgaagtgtcatcatcttcgtcatcaagatcattaacatctaagtctacatcaagatcatcaatgtcaactgataaatcctgaccgtcaatttttgcttcatcaagaacttcatcttcagttgtctcaactgtttctagttcttcctctaaaccctcaagttcctcatcaatattaagcaactcagtatcttcattaagcatcttatttttaatagttttaaacatttaagtctgctccttccttaaataaggtaattatacttatttaattgtttaaaattgtattctttatttcttttagtatgaagagaatacatggaataatcatataattatccaatgtctcctttattttttccttagtaataaaattaacaatttcttcttctactaaagcattgtttaaaaaattaattataaaattatttattttataattatcatcagtatacggttcatttgttttaattcttttaataaaatcactagtaaataaaggcaataaatcactagaatctgattcagaataactaatatggagaatgttatacttgtttttatagagattaaatatgctcttactatcgttaatttcttcaagagtatagtttaaattctctaaattatctgtacttttttcttcaatggctgagtatatactattatcataagcaaaaaattcatccatactttcatttagtagcggttctattttaatatttttcaagaatgttttagaattgataaatagattattattttggataaatttcataagcatattatcgtataactgattcttgaaaagaaaagtattatagaacttattataaaataactttgtatactgttttgataagatattaaatgcatcatctattttacctaacaggagaaaatctgtggtcttaagaatactcttagcttctttaccaatattctcataaacaactttatattcttcagttaattgtctctcttccagtattccaagattatcacctgatagtatataagtaattctatagaatactttattatcaatactactagtctcaacattactaattctaaatagataatctttatttagataattaactaggaaatagtcatttgggagtggtttaagagtattaggtagaacgattgcagtactttctactgatgtatctagaccattttcagtatcatattctaaattaggatcaatttgttccatattataaatagggaaattttcaattttattaaattttataggagactctacaccaataacttccataacaccttgtagtgtttgatcctccatagaattcattatatctttagaataataagtgacaaagtttggagaaccttctatgaaccgagagaaatctttagtggtactcgtaaaattgtttatatatttttcgattacatctttttcttcaataaatcgacccattattttacctcctttaaattaatataaagtcaatattcatttgttcagttattatttacatgataaactttgattcatttgttgaaacatactattagtgatttaaaaataaaataagaaggagggagaataagaaatgcaaaaaattgagaatgaactaaataatcttttatatgagtctatagaaatacaaaatctaatcaatgaaatatattatattgaaagaagtttaattttatctgaatataatgatatttctaataatacagctatattaaatgaaaatttaactgatagtatattaagagttttacaaaaaataaaattactcattaataaaattattatttggtttaaagatatatttagcaaggtaataacaaaaattaagaatgatactcccaactataatttaaatagtaaaaaaagagtaatatcagaaattgatattatactaagtattaataatttacttagatcttatgaagatgtaagtgttgatttgagttcaatcaaccttttattgtcggctagtattaataatacaaagctaaataatgctaatataccaaatatgaaaaagacaattaataataagaaaaaattaattaaagattcttgtgaaaatattgtagttaaaagaacaaatttaacatatatagctagcgatattaatgctattataaaaaataaaaatattttagtaaattatttaaataaaaaatgtaataaacagattcaaaatcaaattatagttatgaaagaatattatcatactttgactaggatgaataattctggcattgatcaaggtaaattatatataactataaattcttttgcagaatttattagcatttcaataagttcatactctcaactgcttacagcaggtatttctattctctctgaaagtacaaaagtgttagaacaatttacagaataatagagaggtagatttataatgcgtggtagaagtagatattataaacattcaatcatgtccaatgcgacattcggagagttaactatcagaaataaagatatggaattaattattccacaaaaatatattactttagaaggtaagatttatcagaatattcagaaacttattgataaaggtaatatagttgagttaaaagaaagaggaattaaaataaataatctaatgtcataagagacattagattatttttattattctgtcaagaaactttctgttctactttaaaatgaaatagtgtatttacataatcatttgtttctggattttgagagataacaaagaccttattctcatctttatcttcacatacaatatcactagtattacaaatatccagatttgaaattgcattaatgattaactttttatagttttcatccttcattcttacaataaaacgacaagatggtttatctctaaattctttatatttttctcttaatacttttaacatctctagataaatgtaatcttccataatttcattattatccatgaatgaaccttcaactaatttaataatttccatttttatgcacccctctagatattggattaatctaactaaatgttgattattcacataaaaaaatcaaaaattccagaaccgtattaaaattttagatgaaatatatattattaaagtgaaaaggatgttatatttattaaaggagaggtaaattatgatttgtgagaaagaaagagagatcacagtagaagagagaattaggaatgtaagaaaattaaatgttagtagagaagtattggaagagatggtaaagagacactatagaaaagttcctgtagatttaattctaaagaatacatttatggttccattatacactgaagctttaccaaaatgtattatatatcgaaaagacagatatcctaaaaatcgttatgttggtcttaaagagactattaagaaacaacattttcagatgtatcatattatatcgaatattaaagaagaagaaagaactgtcgctgaacaacaatttttgaattatatagatagtaaggacttctatagtcttcagatgaaacttctcaccatatttatttccacatcagcaatgactaatccaaatactaactatctccaaaacttcagtaatagcgtacttaaagtaataaataagattaagaatgaaagaaaaattgaatttattggacaagcagaaacaaaatttaatttttatttctctgatcattttcaatttgatagaatgatacatcgtggtattccctatcataatctagaaatggcattaacgccaatcgttcagtttgaaaactataataaatttaagaaagggacagtgatagcatcacaactaaacttaggtgatactgaaattagtcctattatcctagtaggcgttactaaaaatgaagataaagaaattgaatttacaattattacagtactttataatcaagataaaaattatgtaataaaggattgtgatgattttatatgtagatattatcatgaagaacagaaaagatatagaagtattaattataaaagtaataagaaagtatttagaaaatatttccctactattaaggtagtagacgaggaggaaggcatttattaatgcctttcttttttttattgaaaaaattaaatatatattataaaaaagaataaaattattaagggggaagtataatggaaattgttgtaaaagcattaactgctgtagctgaagtaacagaattggaaactctatatgaacattttaagaatggttatactcatattcttgcgtctaattatcaagatgacttatgtttagtagctagaggtaatattgagggagatataattgaagaattaaaaaatgaattgtctgaagaggcatttgaagaattaatgtggattagtaaagaatttaatttagtagataaatttaaagatgaattatatcatattgaagtattatataatgaagatgattatctgattgctagagttaaagataatgattatctaaaagatattaaatttcatgtggaaaaaggagattaatatgtctaaagtactaggactagggttaggtgatattgtaaatttagcaagtgaaagagatggagtaaaatataagttaattgaaagtactaaaggtgataaatgttatgcattattgcgttcagatgtagagacaatatttttctactatgatggaaatcataaaggaacacatccaattatggcagaagataaaaatggaatagacttaactagtgatgaatatatgccttttcttatttttgctgatgaattatatgatggaagaattttaactgaagaacatactggattaaatagaatcattactaaaaaaggtttcttgtcagatagtgaaaaggtacattggaaatccaaaatgcattattttgatgttaactaaatagatattaaaattaggaatttaattatgaagataatttcatcatgaatatacataaaaggagtaatgaaaatggatatctatgaatcattttgtttttcactattaggatttggtttagcaattgcagttgtatgtgtaacattaagtgttattttagtattaaataccaatattcttattaaaagacaaattgaaaagttggaggataaaataaatgactaaaattatctcaggttttccaggaattggtaagagcactctctataataatactgatttaaaagttttagactctgatagtagtaatttttcatggtcaagtccgggagtacgcaataaggattttccacaaaattatattgatcatattaaagaaaatatgggtaaagtggatattattcttgtatcttcacatgatgtcgtaagagaagcgcttaatgataataatattgattattatattgtatatcctgatattaaattaaaagatgaatatctcaaacgttataaagaaagaggaaatgatgataagtttttatctttcatagagaaaaattgggaatcttttattaatgcaattgaagatgaaaataacgcaactttgattaaattgcattctaatgaatacttatctgatattattaagttatttaaaaatattgaagggatggggttgtgaaatgaaaagagactatacagtaacaatcagacattatactaaagggagtatttcagcatgtgacgttgcaaatataataaaagaagaacgacataatttattaggtggtagtgatagatatattgatagtgatggaatgattaaggaagaagattatcgtagtaatagtgttgatgttattcgaaaagcaactgatgaagaaattaagtattatgaagctttatatgaagcagaagaatattttaataaattacattatagtgaggagaaataaaatgaagaaaaaaataattgacacactagagatgtatggctataaaaacataaaatgggataaaaacaatggatatacttttgatggcaattatagatttgctgaactagcacatgatattaataaaggattttacattaatactacttctggtcatatcaatatcaatgagtcagaagaatatattgagcaacttaaaaaagtagcactttttgtaaagacacttaatgaaataaataaaatagaattaaatccaaattattgtttattgattgattcacattttgatgatccacatgtagcatttttatcaggagcaatattatttaaaccaaatgttggtgacattaataaaacattcaaagatgcatggacagtaattggttcttcattcgctagtcctgaagatcaatatgaaatattacgaaatgggaagaatacaattgatgacatgatggaattagctggatgcatggatgacaaagataagaaatactttttagaatatcatccaaatggttatagaacattagatgaaatttctgatgaggttttatttgtagatagagttatcactatatctcatcagccatatgatgagcaaattttaaaagatcgattttcatataacgttataaatggaaaaaatgctgatgactatgtaagggaagttaaagttcatccttctaatgatatggagggaaaaaatatgactttaattttgttatatgatgatatgaatgatggtgctgtttatcatgcttggttggttgaaacaaagaacgaaatatatggatatattaataggctgttccatcattttttggaaagacataaaagtagttattcacatgttattaatagtatatcgaatattaaattttctgatgaaaagataaatgaaataaaatctatgttcctagagggaattcaagacaagattatcaaagaagctattcatcaatttaaagatcgtttagaatttaatgaagatatctaccagaagattgataatatatttatttatgacagagatggtggttattcaaatatggctgaagtatttactaatgaaagtaacaataaactatgaataaatatacaaaaaaaagtaaataataaagataacacctagagctattcattttcatatatgaataatgctagtaaaatgtcctgattgtgaaggtacagggtatgatacttggtttgttggtgataaaaaatacaagatcataatactccatgcattaattgcaatggatatggtaaaattaaggaggaaaataaaatgagtaatcagtggactaaaaaaatagaaatagatgtatttgataaggaaaaatttaccattggtaatccctatatgattattaataataatccctataagattggtaatgaaatttattttggtctattaaagaagataactagtgatgaattagtatttaaaggtcttgatgatgatatttttgttagtattaatgatatattagacgataatataaaaattattaatatgacagcaattaacgtatcaccacaattattttcacctggacaaattttcaaagtaaagagtgatatagaactaaataaagaaaaaattcttaataatggctcattaataataattgattctatactattaggttctaaaggcaaagactattataatattgttatcaagagtaaaggtcaaataacagaagaagtaagcttacctaaagatatttttatggaaatcattgataaaaattcagagaaaataaagatgatgcctagtgaatgacagaatatgtaatcatactgattatttaaaaatcagtatgattactaaatattagtgttaacatgattaatattgtgttttaaaatgtaaatttattgttttaaaaataaagtttttctataactaaaatagagatttagtaacaaatcatcagaggaggaatgtgtaattgaaagtaatgattggttcagcaatgatagtacttgcaatcttatttctcttgtggttggcaatcagtccattattcgagaaaataggtaaaagtaccagaaaagtaaaaaataatatttttaagggtgatgagaatgacagtgagaaataagattattggtggtattgttgcgggtgtagtattaattttaggtctgattatctctatctttatggttgagaaaattccaaacggatatgttggtgtagtttattctcctaatggtggagtaaaagaaactactcttgaccaaggttggcattggattaagccttttgataaggttacagaatatccagttcgtatgcaaacagtaaataacaaagatattaaagtagcaacatctgatggtaaaaacattgaaatggatattgcttataactatgttgtacagccagataaagtggtagatgtattcaataagtttggttcagttaaagttgaacaaattgagaattcatatcttaaatcacgtttatgggatgcttctcgtaaagtaatttctaaatattcagtaattgatacttatggtcaaaaatcttcagaagcggctagtgaaattcaaaaaacatttgctgaagatatgaaaaaatatggtttcattattgatgatcttactctaggtgtaccaaaaccagatatggctactcaagatgcaattgatgctagagttaaatcttctcaggaattggaacgttctcaaactgagatcaagattgctaaagcagatgctgagagaaagaaaattgaagctcaaggtattgctgatgccaatgagattattaaaaaatccatgtctaaagagattattatgaataaatggattgaaaagtgggatggtaaaatgccaaaagcaactggtagtaactcacttcttcaacttcctctagaagataaataacagtaaaataggaattagagtctgagtgactctaattcctattattaatttacataggagaattgtaatattttattagataattttccagagaaaatgtaattgatccagatgttttaaataaagggagataatatgaatcaaaaaatattgcctataaaatttatccttatgtctatgtctgaatgtccatattgtaatgctaaaatagttaatcataattatcatcaatgttatataaattacaatgatattaaaggtactatcaatataagatctaataatcaaggagagaaaaatttatgcttaaactattctcaaagaaaaataaacctaaaatatgtaaagaatgtggtagagaatttattagtgagcattgggcaatttgtcagaattgtcttaagaaaagaaattggtggtcttaaaaaataagtataaaaggggaaactaatatgaaaacaacaattactgctgaggaattagtagaagcatataaaaagactggtattaaacccattaataaagtatatgtaaatccagtaataaattgtggttgtgcattatcagttctatctatcagtaatagtgacggtaaattatcattaagtaaaattaatgctattagagatgttgaagaattagaagatatttttagaaataaaattggtcttgatccaaactataatatcgaagcttttatggatggatttgattgcattatgagtggacaaatgggtactagggaatgggatgaaggatataaatgtgcaaatgttattaaagaagaatttttaattaatgatctaagtcggggggtttagtaatggagaaagaatctataaaagatttattaagattaagagttagtaaattttcattagaaaatgaatttaaaaaaataaatgaagatgatattgagaatattactaatgaaatcattaataatgttgatagaacaatattgactaaacatgattttgatcattatttaagaaataatgtaaatcctcatattattgatgatattatactaaatgctactaaagaatatttaaatggatacacagtatcagatcctaaagaatatatatttttgttagtaatttctaatatgattaaatatcatagagattttgacacatctggaattggatattctgaagaacagattgagaagaacgaaaatgaagctagtttatcttcttctttatctatcattgacattaaaaaaatttttggtggaaaagaagatattgagaaacatattacatttttaatgagaacttatggtgtaagcagaaatagaattaagtacttttctattaactaaaaagatcttagaggattaaaagtaattggggaataataaaataaaggatagagataatttaatctctatcctttatttttttttttgtatacttaaaaactaaatttccacaatcccaaattctatcataaccagcttctctcataatttgaatttctgttttatcattactataaatttctggaaataattcttttaatctttgttttctatagttgtatctatgtgaaagactcaatttatttttattaaaataccaataatttggctgagaattatgcataaagtgaaagttatttttataatatacatttccttctgaccatcttaaatcagcatatgttatgatgttattccaatcataattctttttaaaataactgaataattttccaaaactacctattacattatagtctctttctgtagcaaatctacttaattcatagtcatatttattccctttttgccctaagctaactctaggtttacagaatgtcattactgctactaactcatcaccctcattccttggataccatagtcccagtttaatagtagagttatcagatccctgaatatgatttttatctaaaaattctcttttcacattattctgaatttcttttatataacattttctagcatatattttttctccattatttaaacctaaaatatgttttatctttccctttataagttctttattatcaatccactcattctcaaataaatgaattaatcttatacctttttcattacattttttcaatttatttagatggtagtttctaccttttccttgagattcaccatgccaatataaaccattatattcaattgctattttctttgaaggtatataaatatccagttctaaaccttcaagtatttttctgtctgatagaattacattagtgctattggggagaatttgtttaatataatcatataattcaatctcatcttttgaattatgtttctttagttgacatctaggacaatctcttttaacttttttacctcttgaattaccatgtaaaatatcgaccggtctaaccttccaagaatagccacatgaatgctcaataactattggagttttattattaatatatctactcttaattgtataatcattactattaaatattctataaaaatcttctttaaaaccattagatcctttattttttggatttttattacatatattacacctttttctttttaggaaattagttggtgtaataaagaaattatgagaatcactagtattgtgtctcatctcaattttatcttgagagctaatatattctcctaatacagtatattcatctcctactaaatcatacacttctttaataaacatttcagtagtctttgtctttttcctttttattagtttcttagtacaatcaggacatcttgaacccttactgagaaagtcattaggtctttttttaaattccttattacagatgttatgtctaagtaatactagttcagaactattaatatattctcctaatacagtatattcatcccctactaattcatacacttctttaataaacatttcagtagtcttattttttcttttagatattctttctgatttatgtaaaggacatctattacctgcatttaaaaagccatttggtgtgacatagtattcatgactgcatttttcatgtttcatttttattttattattagttccagtatattctcctaatacagtatattcatcccctactaattcatacacttctttaataaacatttcagtagtcttctttttaggcaaaacaatcatccttttatataaattggatttcaactattattttgtttagttgaaatccaatttgtttatcaataaaaaattattctgaatatattttaccaatttctcgtttaagatgtactaatgctttgtttaaatatagagcattataaatatcaacggtcatgcgtgaaacaatactcaatggactcataatagcttcaatattctcatctggatcattctcactaaaaggctcttgatctttaggaataacatcagatacaattgttttaagtgctgtataatacgtaatcttatctccaataccaagttcatcatcatactcaatataaatctcaatgagtagtccgtctacttcagtacctttaattttctcacctgattgcttttgaataggtttaagattaacagaagtcagatcattagtaacagacttaatcttatcttctttcttcttactatctttaatatagttcttcagaatcttttgtactgaaggagaaaactcactgatatctttattgtagtacattacaacatctacaatcttaccagtatatttagaacttactttgttcttagataactcattaatagtctcattaaagtcatctcctagtttatctaagagttggttgagtgatttatcttcaaaggagttttcaaagataatcaatggatcaccagtcttaaccatatcgcctttcttaacaataaagtcaatgtttgagttaactccaagagcaagttctttcttcatagtaattttagtagataggtcttgagataagctttctgtaataatactactatcttcataagtgtaatctgcgcttgctagtgctactttacaaagcttccctgtagtatacgtgatatcatctttcttatcgccaaggaagtaacttggattcttcgctaggatatcatcttttttgaatttctctcctactttgataatgagttctttacgattagcaatgtaaacaattatcttccaccaaattcgctagttttggtgcgccctctaacggactgctccatgttaccatgaagttgagactatatcttcaaagttccctgtttcccagtatacataaataaaagtataccagatttcatctcagaaacctgccaccaatcgcttgtggggtactctactcatctttattaataagattttcgatagtcgttgaacgttctctattagtttaatagagcttcgcttctgattatccttttaataaggacttcccagaaattaaaggaatttaacgtgagcctttaaacccaccattactattcttactcatatgctcggagagatcaatgacgtctttcttaccatcattataacgaacgacagctagctcatgttcttcatctatggactctagaactccatctttttttgctctaaacacaaagtcgtcacttagaatataagcaacagtcttctctacaccactaccaaatagaggtttagattgctttgtggtaggaatgatcgttaacttccattagattcgctacgtctaatgcgttctcttatgaactgctctatatttctatagagacgagactatatcactatccttaataattaaggataactcccatttccatttaagggattctcacccactccaaacacttgagccgtactcctattgcggaatttcaccgctactcacaatcctaagattgctttcggatagtcgttgaactttattcaaaagttttctttaagtattcttctagattacttaactgtgtataattgaatctgaatagtttataaccctttcttttacaatactcattttttagattatcacggaattgtatatcctctaagccttcttctccaccaaaaaaatcagatggcttaaaatgttgcttaccatcatattcaactaatattttagttccgtcctcatcttcaaaatagaaatcaaatcgtaatcttcttcctgtttttggattaactaagtctgaaaatgatttttcaatttcaaagtagatattattctggttgaaataattagtaataatttgaatcccactagaatttcttccaattccattactacaatgaggacatctgtaccctaaaataaagttatttggctttatcttaaaagttttttcacattttccatgatataatgtaacatgtttgtgagcatgggtatattcatttgttagagaatattcattaccaaccaattcataaagtttttctttaaatgtctctgtagttctttttttagttttagcacaatttggacaacgataaccagaaagaaaatttacaggtaatacagaatattcattaccgcatttgttatgtctcatcttaacgtgagtcatattgtttatatattcagaagtaggtttatattcattaccgaccaattcttcaactttttttctaaaatcagaatcggttctttttttatttttagcacaatttggacaacgatctcctcgtctgataaactgatatggttgaaccttatattcattaccacatttattatgtctaaataaaattttagtatgctgtgctaaaaatcttcctaataccacatattcatcaccagttaattcttttactttctttacaacttccatatgttttttattcaataaacaaattggacatttagttactttatttttcttaaagaaactatctggtctcatttcaaatgtactatcgcatactttatgataaaatatagcatttatagttgatgatatatattctctaacttcaaattcattattatatacatcttttaatcttctagaataaactttacttaacatattacaccctccgacaaacagttgtaataatatgttaaattatttaaaaactattttgaatattagctgctgattctccaattctattagttttcaaaccttcacgcttattatttctaattacgttgtggtctaatagactctaaggaatttccagcaattagagagtttatctaatagtattactactattaggcacgaatcatgcttttgttgggtactctgcatgcctactcgtggaggatcagcatgccttactgtaaaggagttcaataattctgctggaccatagatatttgtcgtgttattttttgtattaggattggtgtctaagaatcctcgtgtgtttttaaatgctggatcaaaagttaactgtctaacccattatcttcatataggttcgctacacctataccgttctcttatgaactgctccatgttaccatgaagatgagactatatctttatctagtcaaaaaaaaagaaaggagatgactagatatctcccatttccatttaagggattctcacccactccaatcgcttgagccgtactcctattgtgtgttaaccactaaaggatagtcgttgaacgttactctcgttataattaaaaataatttataaaattattattttattttttccataatagtagctctcctttttaacttactactattataatatatttaacgagagtcttcgatacggattgtcctattattaggagtttcccgtagttagagagattttatcattatatatcactatataagggggcagtttaattcaccccaactttcattatcttccactagattcgctacatctaatgcgttctcttatgaactgctctatgtttccatagagatgagactatatcatcatcctattaggatgcctcccatttccaactccaatcgcttgagttgtactctactcccttccactaactagcgttatcacaacgatttgttagagtggtttcgatagtcgttgaaccttactctaatgagtcttggatgctgattgtccttaaaggattttccagcagttaaagaggtttacttataatatttctattataagggactattataaatcttgtctggaaattcaagaattataataattcaatccgagtcgggcgttgacattgccatgattccacgcatactagggtcataagctcgaatatcagttgtataagcatccgttttccttcatataggttcgctacacctataccgttccttagaactgctctaagtttccttagagacgagactatatcatcacttaaaaagtgcctcccatttccagcctcaattgcttaggctgtactctactcccttcctactaactagcgttatcacaacgatctgttaaagtggtttcgatagtcgttgaacctttaccttattacaaataatttgtaacttaggtacttggttgcttatgattacccaatcctttaaatttttaccatacctgaattgttatattcagccatctattatgtttccatatagatttggtattaaaggctctaagggttttccagcagttaaagaggttttaattggactaaaacactttaatccaagttccttcctgaaagccccttgtaagtagccgcaccacccttttcaatttccaaagaagggttaaggacactatattcatcgacagtaggtgaattcattaatgtctttaatagaatatcctgtggaacagacatcttaataggattaccagctttcagtgtatccttatacgttttaaatgaatctgccaagattttatatagataagcatttacttgctcagtaccacggattcgatatgaattcatatcattcagtggactatagctcatatcttccaataaggtattcgcatacaacaatatgtcatagatattctcaggtaattctaactgtttcagcacatctaatgtgataggatcaaccattagagatagagtattgtgaagacctttacccatatttctactaccgaacatctcatagaaagtctcaatataaggatctttagagttcatttcttcaaatgcatactcttcagtagccatagtacttagaccacttaataatagggaatttctcaataaagaattattataatataggtatccatctttaaaacggatcttatcatagtcatcatcaattgtaattctcttatttttagtatcaaagctatattcaatattatatctttctaataaatcttctaatcctaattcatatccaagaagaaccactagagggatcattctattattaatacgaactcggttatatgctagagacttagaattacttaaagaagataattttttataagcttcctcactaagtgaagtgacaacaactttaataatgagttctgaaagactcatatcagtattttcttgtttcttattattaatcagataaactcttttacttgaacgattaagagcaataacgttttcattatcttttgtatgaccgattggtaagaattgtttatcatcaatattaatcttagcaagcttagccatattatcaagatcacttttcaataaatcttctacttctttttgactgaacataagtttatattcatcattctctaagcttagaaggaaagaagaaatctcattatattcaagagttgtttcataaccctcattaattgttagagcgttacctaggcgataattaaacttcttacctgataccttaaattcatttaaatccataccaaagagtttcttaagtttctcagttttatgagataatttagaaccaaagcgcatgacaaaaaacttattgtagttagtagtaatctgaacttcatcaggttttgtttttacaatgggcaaagatagaatttgcttaagaattaattttttaccaccattaatattcataaacctaccatctctgataataggataatcaaatttaacagtatgctttacattacgatcatcttggaaagtaacagtataagttaatttttttgataaatcagtagatgtgtcttctgttttaatatcacttacaaataatttaacatcgctatctccattaaatgatgaaagaactgcaactaagtcttttttcatctgtttttcaaagtagctcatatcaaaatctttgagatttgaatatctagtttcttcttgaataacatttgtattggtaattggctttcggtcaatacttgttgatttaaagtcatcaataatatcttgaatattaatatcatcaagagtaacttgtttttgtttttcttttagacgttcaagagtctttctctgtttaatttcatctccaccagtagactgaagctctttaagagttgaaatatcggcttttaattctttactgttatttaaaatatcaatgatttcatcttcacttttatcaagaatatcttcatcacttgaatcaatagctttttcaatatcatcaccaatcttatcagtaacttcaattgcactactagatagttttgtatttccatcgatttggaaattacttaataatttttctttaactctttcagatttttcttttactaatgcatctctcttgttttctgtttcttgagttgcctcttctttacctaaaggtttttcatcattattagtcctctgatggtttgctgttttaatgagaacatttaatgcattaaggaatctatttgcaagaagattagaaagttcatcattaatattgaatttaataaatgtattattaactgtagtataaaaaataaagtctacattcttaagctctttcttctgttcctctgttaacaactttcttttaattgccatatagatataagcaaaaggtgttcttgcattatttaagtcaaagaatgatggatcaagaacattgtcaggaacaggaattgctactgctttattctcatatgatgcgccctctttaattttagatataagaaaatcaaagtacatttcaactcgttttcttccacgaactttaatttctacttcattctcaagatgctcgtttgtaatatcatagatcaagttaagatcattataattagttaaggcacgtttagtataaataatactagaacattttgcttttacctcatcataatatttcttttgatctacaataattcttttattcttctgaatggtattgaatgctcttggaatatatactcctctaaaaaaagaaggactgaatatattagaattaataaaatcaaatatctcactttgattatttcctgaaaagaaaatcaaatttgaattacggtcatttttcctttttttaatggatgaaagttttatattagagtacactctcaattccttgagattatcaagataaaacaattatacccacttcctttcttaacaatatctatttgtttacataaaaaattaaaaataaaaagataaggttttatccttatcttttattatttattctgttatagattcattcaatttatctttattataaatagtaataatattattatctatagtatcagattcatctgaaaatgaaaattcactttttatatatctaattaaatcatctttatctttaaaattttcttgagtataaggatcaaatggttggtaatagaactgttgtccactaggaataaagtaaccatctgtaacccatcttccatctttttcttgtctgagtataaattgcttatcatgactttccatagttgacacccctatacagttttcgtttcatcttcactagaaaccttcaagttaatcaatacttcactcttatttttaagaactactgtaataacaaaatcaccaagaactaatggagttcctttgatcatttcactatcagtatcataatacaaacttgaaggcaatcctttaacctgtttaataagagatacttcacttgtatttaattttacggttagtgaatgtcctgaaactgcattaattgaaaagtcttgtagaccatttacagaaggttttaggtaaatagtatagtccattttaacatcaattgttgacttaagtgaagttacattagttaaaaatactttatcttttttattttctttaacaattagattggaaaaaccacttaatacaggtttattagaattaaaattacatagagttgcctgtgttttccctatagaatcactaatatttttaacataaaaagtatttgttattatatgattatcaaggttatttaaatctgtaatttttccatctttgacattaagttcatttttcaccttaaaaccatttaaataagttaatctagttttaacaatcactttacttaaccccttcataagaagtataagtagaaatggctcctgaaccagttattataattggtactctcgtaggtgatgttgagcttgtagaaacattatatgatttatcttggctatctctaaatattgcatttccttcaagcattaatttaatttctgtttcttttaattgtcctgtcatatctcttgcctcgactagtattgcactttcaatattttgatccacataggtaatatctgtatcttcgaaactaactgagacatcaactgacaagaaaggactaatcatttctaaattagcaccttctttatttcttataaaccaaactctttctaaatcatcaatacctattgatctaataggatcagtaatattctctactaatgaaaatctctttgtagtagaatcagcagtataaatccagaaaccgttattcttaataattgtaataaattgatcacctaatggaaaaattgctttaacaccatctaaatgaaaatctttgaatggtagagaatcttttaaagttaaatttaattcggtatcatcaaattctaaaagatgaattgggaattcttttgttttactagtatttgctaagtaagaagcattctgagaaccagttttagcatttgaatatgatgcattagcataataataattatcccaatcactatagaagatttcatttaaatgtgaaaatacatttccaatatataaatacttagtattattaacagtaattgatccaatttgtattgaaaataaatttaaacaattatcttgataattgtaaagtgtttttaaatccaagccagtaacactaagatttgttacagttcctatttttccattaggaatatctataggtaatttacacagagaactacttgaaccagtagcatattccatttgcaaataatacaaacaactttctttagtatcaaaatatggtatttgtctagcaaatgtagaataaccagttgttgcacctgcatgaatatttttactaaataaaactgtttcaactaatgttggtgaaatcatcttaactattagtcttgtttttggtccagccactgtatatgttgtaccatcttccttggttacagtttcattattaaaaatataaccttgtgttaaaattattaaactgccattggaagttttacctaatatatttaaaatttcttctccacttagagtataacttttagttagatttaaatttttatcaaataggagtatgctatcatttaagttaacatcattataagctgttgaggttgaagccaaagaatactgatttaaagcagcagcactataataattattactatacaatgaaggtgataaaaattgattactggcatatttatttaattcaagatattcttttccgaataaactaattttagaattttcatcattacgtccagtattatttatcccaaatcctccataatttatcttattcctaacaacgatgaatgaactttcatctaacttaactaacgaagtttttcccaatccatttgaaaatctataggtatttaagatttttccatatttatattgataaatagcgcaaccagtatttccagaactttccgatactctaatttctgtaccatcattgaatgaaattgaattctgaaagattgtttcatctttccgatatggtaatcttcctcctacaaaagcagttctaccatcataattaatactatgagttcttgttctagtattaatattatttgcattatacatggtagaataactaaagtatggtgatcttgcaactttctcttcttgtaaagaatttttattatacgtctttccattaattaaaattgtattactctcttcctgaaataaagggaaagaagtaaaattttctcttgtaattgagaaatttccttgaccaattgaataaattacactcataaatatcctccttagatacttttaatagaataagttaatgtacagtttcctcctatagaaatgacaagatcacttctttgtgaagaaaatgccattacttttcctgcatctatatttccttcatgtaataccgaacctaatgatgtaatcttaaaaggaatagctatagaatttttgtttttaatattaatactacagcttattacagatgttcccccaatcgtatttaatatattagacatattaaatatttcagttaaatttgttatattagtaaaatctttagtctcactttttgagtttactgatagggaattcttttgtaagctaagaatatcttccttaatagttttaccaatgataccttttatttgattctgattaatcaataagttcacctccactctaaataattgtttttaatttagtaaaaatataaaaaataagcataccctttttttagaggtatgcttatcttgtttttccaattatttgactcttaatttttgccctacatagattttattaacatcagctaatttattccatgatttaatttgatcaattgaagagccaaatttcttagcaatagctgatacattatctcctgcttttacagtataatactgtacagatgaattagtggaactaccactagtaggaattttaagtgtttgtcctacagaaattttatttggatctttaattccattagctgatgcgatagcattaactgtagagccaaatttcttagcaatagcagttaaattatctcctgcttttactttataagttgtagaagaactagatgtcttagtagaacttactgatttagaattaccgctaagtttaagaacttgacctacatagattttatttggatctttaattccattaatactttgaagagtagaaacagaaactccaaatttactagcaattttggaaagaacatcacctttttgcactgtgtacgtaccagaaggtttactttcttttttaggtgctgacactgtaactggttttacagcagattctgttttaacaacttttttaactccgccagtaaaccaagtaagtgatttatcaccatttagtaaattcatgtcaagagtaccgttataccatgatactttcccatattcggtatattgccagatgcaacaagggaaatctggttttttattagctgtaccatcattacgaccataacgaggaatccataagaagtcagcatcaactttattcagtccataagacatataaagattgtgagatacataataaccagtcttataatcagcttttctacaagtatcaataaatgcttgtgaggcttctctaagattagcagttccgcaagatgcaactgtatcatcctcaacatcaagagctagaaatttagcatctttatcaatacggcttaggaaatcatttgcttcaataatagcatctttaactgatacatagtgtccataagcataatgaccaaaaggaatgccgtatttcttacaattagccacatgatttttgtattctcggtcaatagtctttgaaccatattgaacacgaataatcataagatctacttctttagccgctcttgcccaatcaattgcacttgaaggttggtggtgagaaatatcaataatgtaacccatatataaaagttcctcctttaattaagattaataaaatgttactttaataatgcgataaaataatattagacagatataggtatattattaatatttctatcgtcttcaagcatccaaggcttaccttcatatagactatactgctaaagaattattaggacattattactacacgatattgattcaatgtaggcgcttgagagaagctaacagtgatattattttcatctattcttacaatatctgtactaatattagcgaatgtttcattatcgaatacttgcacaataacatcacgagtattaaaattatgattaactgtaaaagatgtagcagttccatccccaattgttgatacaaatttaggatttaaactacctacaatttttagaccatcagcatctgttgctaaacgtgaatcatttaatttaacttttaagctaccatcagtattttgctctaaaccaagacccgctaagtctgtacctaatttagtcttagtaattgacttatcaattacctctaattgattcccaacattaagaccgatagagacattatcaatttttacattaaatgtatcatcaatattttctaaacctctaccagcattaattgtagttagatcggcgattgaccaagtactattagtatacttgaaaaattgtttatcacttttgctaaataataatacaccatcacctttagatgaaacatcataggtaacaacaaatttagatccatcatattgaacgatatctccagcttctaaaccttcaattgttccaaatgatgaatcaagtgtagttggatctttaattacataacgatctccaacaacaggagaatcaattaccaatgtagcatcagattggattgcttttacatcattttgaaaatcaaaatcagcaattgctttatcgatcttattttctacaaaggatttacttactaaatcagatccttcagtcggactaggtaaattgacaattttagccactccacccaaatcaatattactaagaactttcatgacaacaccatcctttataccagaataattttttgttctatcaatcgattatcaaagtgaatatttcatcatcgtctgttggagtttttaataaaatagaattagtactctggtcttctgtatagtcaatatttaagtcttgaaatacaccgttcctatatatttttaatgaaccaccagtattaaaactaaaaggtactgtaaaagatgattgaccttttaatggggttattgtttctcttttcttactattagaaccatcagttataggtttaaatattgaaccattccaaatataaattttataattatcttttgtaagatataatttattttgtattttttcagttaaggaatttaattcatcttcactttctacaactataagatctgatatttttaatttttgtccattacttcctactatatataaatttctttcattagtaaaaataatagttcctatagtattaattgaatttaataatgattctttaatagctctaaatgataatttcaattattttacctccttattcttttagttaataattttttaaaaaatttataaattaaattcttcccattcaagagatacactatcacttgcaataaatttttcttctgctaaagaatatgatagaatcgacttatcttttatgtttgtcatatctacatctgacatttcagataatttggaaataattttctttgcttcccatttattactaacagaattgtaagttagaacgaatccattctcaatagttgggttaatactaacatcagatagagaagaaaggtttaacttactttcgatctcttgaataattctatcaggagaccatgcatgatcggttccagtagtattatcatctataacaataccgcttactttattttggtaaaatctaggcactataatcacatccctatattatttagattttaataagttgttctcgtttgttctaattattattaattctttttaaaatttaaaagaatagataacagttatatagtttggagaaatttcaaactgaaaaataaatatatattattttattgaaaaatctaagataataggtaacaagctattactttagattaaataaaaattacttatattacaggaggaatttatcatggcattgaaaaagaaagtagttcgccctaaaacatctggagagttagcggcagaaaaagcaaaagaggaagaagtacaacagccagtagtagaaacaactgaggaacctaaagtagaagctaaagaagaaaagaaagctacacctaagaaaaatgttgctaaagctactaaagaagaaaaagctgaagctacatataccgaagaaaaacaagaagagccagtagaagaagtagttgaggaacctaaagaagagaaaaaaccagcaagtaaaaaagaagctaataaaattattgctcttaaatcagttaattcctcagaagaagaaagtgataactctggtggtcgtcgtgctactagaaaatctgtaatgaaacaagttcaaaaacatttggaagatcaaggaatttctatcaccctagacgcagttacaactgttgtaggtgcttttgaagaagttctagatgaagttacaaatcataaagatttcaaattcatgaactcaatgattaaacgtcaagagcgttctggtcaagtttataaatctccaaaagctgggtatgactcctataaagctgatcgtgtagtaaaaacatttacaaaagatacaactaatgtagataagttccgtggtcaatatctgaaagatgaaggtaaatttattgctgatggtaaattcaactatgatactggtgaattcgaccctgtagaacttgaaattgaagttggtaagaaaaaataatataagataatgaaggtaaatgagattatctcatttaccttcattaatattgtaaggggaattattttttagatgaagaaaataaaagttagagatatcattaataactctcataaatcagcaaatgatataattcttggtgtggtaagtttaattgaagatgcagaagtcattataaaagttgatgacttattaaaagaaagaaatttatctcaaaaagatttagctcaaatgactaatttaagaactgcaacaatctctgaatttataaatggaaaaggaacagttttaaataaatcaaaattattaagaataatggtagcattacaagttactaagatagatgacataattgagatcaggcttccagaatctattaaagaaaaatatattctaaacaagtgaacaatggaaaaagaaacgagaaattccttttgaagttaaggaaatgtatagaaacaataacccaaaataatagattaaggggatctatatgagaccagattttactgatagaaatattatctataataaaaaaatttacggaataggatattatgataaaaagagaaagagatatgaatggttagatgaaaaagtaaataatcttccgttatttactttttcattgagagatctgattagactaatttcaagagatgaacaatctaaattagacaatggttgggaaatttatcaaatgaaagtaactctggaggatatttcaaatatttcgggatcaccaacagatctagaaaatttaatggttagtatgtctaaagagatttgttttccagtcattaatagaatctattttactatttttaatggagaaggagtttattggacacttgactcattaagtaaaaatcttgacaaccagaaatttgttaaatttgaaattactgaaatgcctacactagttgagagaaccaatgaccatcatattactttaaataattgtagttatgatataactactttaaactaattcttaaaatgatttaatagatatataagatttatttttgggaggaaatataacaatgaaaaaggttttatatgcaataggaacaccattaggaggaaatggtaaacttaattttatatctaatgccaataatggcggtccaatgtttgttgaagataaagaaaaattgattaaactaatttcagatgatccagtagcttttgatacatggaatatatacgaatttccagtgttagtgcatgacatagtctattatagtgattttagagaaaaatcttccattaccttaagaaaagatgaaaaatttacctgttactataatagtattactaaagagttattatggaattttaagcctgatgaattattatgtggaaaacctgttagaataacgattttagataatcctagaattattaatgataaactaatcaatgacaataccaattatacttcaagaatttcagaagatattcttgaatttgactttgatttatttatgaaagtacaaagagaaatttatttaaaatatgaattaaatactaaagatgaaggaattcacttaactgatagatattttatgcaaatctttgaagagattcatgaagtaaaaagagaagaaaatgatatgaaggtaatagaagaaatattagatattgttatgtacctcggaagtacatattgcacatttgataaaaacctaattgatcatggtaaaaaagtttttgtcaagaaaggttatgaatatggttttactaaaaaagatattcatgctttaatggatagagtatcttctagtttaatggttgtaagacgtttgtatccagaaagaaaatggcatagaaaaaatagtgatcctattgaaaacagagataagattgctatggatacaattagagaattaatttgggaattattagagtatgtattatttattaacctaaatggatttaatggtgttattgattctatgatgattactaagcaattgaaaaatctaaaataaaagttgttataaagggagagactaagatggctgaatatttgaaaatacctagtaaatttaatgaaattatagaattattaaataaacatgaatataaagatattacttggagtactacaaacggattttacattagagactgtgctggaatgtctattgatattagatttaattttaatattaatagatttctcgtgactataagaggaagaaattatgaaaatattaatattgatgaattacaaaaatatattgacgaattaaatgagactaaaaatctaattgataagttaaataaactccttgaagtagacgatattcctactccagatctagatgttgatattcctattgaaaaaactgaagaaggaaatgatttttaataataactatggataatcttgaaatggaagttaataatcattaattttaatgaaaataattaacaaaaaaataataatgggtaataagggttataataatataactcttattattctattattaatattaaaatattaatttttttattatataaacaatattataaatataatttataaataattatttttttttttatttattttataagtaaagaaggtgaaatagtatgccaatgagagtattaccaaaattcgttaagaatgtaggtaaatcacttggaagatcaacagcttcagcatttggtgatatgatgcctagtatgaagaattcaggtattgatagtaaaaattatattgctgaagtatataattcttccagagaaaaagtaactcctaatgaagttaaacagacctacatttataaatctggtcagcaattaattaataatgcaattagagatcttaaatcaggtaatttctataataaagaaagacaacaacaagcatctaatgattctttcaaagagatgtttggtattgatttagataatcttactaattttgaagatcaaaataaagaaacaacaaaagaaaaagatggaaaaactattcacaataccagtaataacactcaacaaaatgtttttgtgaataatagtgatccatctacttctaaaagcattcagcaattaacaactatttcatcttcagctatgaagatgagtcattataattctagtgctttgagtaaacaaatttctacattaattgaattccagcataataacactaacagattctatacagagatgtcaagtaaaatggctgatattacaagagatgttagtcagatgaccggattccttggtgtgatggctgaggtttcagtaggtggaactagaagaacacaaggcgagtctatgcttgcaacattattagggttagaaggatttagtgttagtggaatgaaggatatgtataggaaaaaatattctaattctactggtggaatgaaggatacatttaatcttgttattaaaccttatattgatgaagttgttgcaaatccaattggggctttaactaaaaatgcaattaagttagctttaccaagagctttaaaatcagctgttggtgatatggatcaaatgtttaaatttcttcctactatgattcaaggaaaagctaaagattgggaaggtagtgataatgtctttaagagaaatgccgctaaaatatttggcattgatctaaaagaagataagggatttaacttttctaattatgaaaaaggaaaggtagcatttgatggtgtaactagacgttctattgttaatgtaattccatcattgttatctaaaattttggctagtgttagcaataattcaactcataaagaagaacttatctatgattatgataaaggaaaatttactactagaaaacgtgtaataaaagaaatgaatagtgatattaaaaacttcactattgataactacgatcttactaattataaagaacagattgcaagagagaatcaatctaaattttcaagtagtgaagaattatctgcttttatggaaagagttgataaagctcttttatccatggttaaaaatagcaaaatgattcatggtaatagcaaggcatctgatatttcggaggacgaagatgttgctaatgctatcttaaataacttcaagggtcaaacaaatgctaataagtctaaatatcaatatgacctactaagtgcttcaaaagcttattctgatatttatagaagaattgagcaaaatgaatcatttaataatgcctttgatatgacaaaagaagaaagaatatttgagcctgaaactaataaagaaatggctagaagggtaaaatcaaatattgatagattctttggtgttggtcaaggaccagtagaaaataatatgagtaaaaagaatcctctttattggttaactgaaggtattaagagagttaatggaaaaacttctgaatttttttatggtcaggataataatgaatatgcatatactagacctcaacaaccttcttctaatcagcaaaatacagtaaatagaggatctaagataaaagattttgctagtagagtagtaaatacaggaagtaatgctatttctaaattaaatacaagaaatggtttaatgcctgagagaagaacttcgccttcaattcctgttatttcaaatactgaggatactagtagtaataatacaacaagagaattaagtaatttaaatcaaaatattgaagaagtaaataatgaaattagtggagatagaggtatcaccagaagcatcttcctgttaaatagaaatattgaacgtaataataggattatggaaggtagaaatgatgagaaaacatcctcttctactaattcaactgccattagaactacgaatgtacaaaacccagatctttccattctccctaagattaatgataatattcttcatattataacattactagaagctaaatttagtggagatggcttaccaataggtaggattggaaaattcaaaaatattattggtagttataaggataaaactcttaatttctttgaaaagttatttggaagaggaagatctaattcaggaggtttcttctctagaacagcagaaaaagttaaaggctttattggaatggtatttggtaattcaggttccagaacttcacttttatctaaattatttggtggtgcaatggattctattagaggtgctaatggaagacaatctattacatcaagacttctaggaagagatggcattatcaccaagtttgtttctggtacgttaacaactgttttggatgttgcgtctaaaacaattccaaaagcaactaaatttgcaggagaggtaacaaaaggatttttaaattttggtaaaagtgctttttcactaatacttggagcaggtaaaaaaggattagataaagctaaagaacttcgatcaaatagatctgcaagtagagcaagaagaagcggaaatagaaatattaaaggaatgagaggcttacttggtcttttaacaagtactactgggagtgttataggaggagcaggtagccttattggtggaagcttaagccttggtatgagaggcatttcaaaagtaggagatatcgcttcaggtattggtaataaactatctggtcgtaaagggcataaaaaaagtaaatcttcttctaatagaagatctttttcaatgccagatattttagatagagtatttaatcgtaaaagtgattcactgcatgtctttgtagatggcggttctctagataaaatccgagaagtagttaaggttcagacacatattagtgatggaaactctgcagtagaacaaattgcagaatttaaaaaaagacgtcaaaataatgaaaatagccttcttcaaaacttaaaaggtggtagaaagaaaagaaatagaaataaccttacaggtgaacagtcttctggtggaggtttcttaagcggaacactaagtaatattgcaggtgatattattggtgaggtaattggaaataaaattgctggacgtggaggaagagatactggtactagagctggaagaagagctggacggagaggaatctttggtagaattggcggtctctttaatcgcaatagaggtgcatctgaagctattgaaggagcaactgatctagcacaaaactctactagaatgggaagaaatcaagcaactggacgaggaattagaggtatgttcagtcgaattggtggaggattatctcgtctaggtggacgaggaatggcaggaattggcgctttaggtactggtgctggattggcatctgggggtgctggtgttgctcaagccgcaactacaggagcatcagcggctactactgcggcaggtgctagtggagtagcaggagcggcttctggaggtgctaaaggacttcttagaggagctggaacagcacttagaggggcaggtagattagcaaaattcattccaggagtaggattagttgctacagcaggaatgggtgttatggatgctattaatggcgttcagaacgctaaccaaatatttggaactgaaaaagctactttgggacaaaaagtatctgcaggagcaggtagtgttataagtggacttacatttggtttagctgataaagaaaaagtttcaaaagggatttatggatttggtaacaagattaaagattttggttcaaaagcattaagtacagttaagaaaaatcctttattgctcgccggaggtattggtggaggattaggattaggtgctttaggactttctaagatgtttggaaaaaaagaggatgaagatcaaaaaagagatgctgaaaagggagaaaacagtaagcaacctattaataaaatctctgcttgggtcgaaaaactaggtaaattcttctcaattggtgctggtggtacattctttagtggtatctggggaatgattactggtaaaacaggtggtatctttaataagattggtaactggtttaaaggcttatttggtggaggaaaagatgatagtaattcaggtggcgattcttatactggtaaaattggttctggtattggagcactagccgctaaatatgagtctagtggtaatgctggaacggtagcaaatagttctggtgatattggtgggcaatcatttggtaaatatcaacttgcaagaaatactgggtcttataaatcttttattaataagcttagtgattatggtcatgaagactgggaaaaacaattaaaagcggcttataatagtacctctcaaagtgcatcagtatggaagaagatatataaggaaaatccaaaagaatttgaaaaagttcaggatcaatattttgcagatcaatattttagaccagcggcaggtaaaatcaaatctgcaattggtttagatgttggtaaacgttctacggctgttcaagcggcattattatctactgctgttcaacatggaactgctggtgctgttaatgtttggaaaaatgcacttggtagtaaagcaaatgatatgtctgattctgagattatcaatgcagtctataaagagcgtgcggctaataatggtatgaaatatttccctagttcttctgccgctattcgtaaaggcgttgtgaaccgattctcaagagagaaaaaagatgcattagcaatgttagctaaagatggtggagaaaaagcaaatacttcatctgatagtgataaagatacaaaagattcttcaacaacaggttcaacagcgtctaaggttatgaatgatcgcagtcaattttacgataatccatttaactcagcttcttcaggtggaggctatacaaatagtacagcaggttatgactcagcaccttcttcatcatataagagtattggtggatttagtcttggttcatctgctggaaaagcattaacttctggttctgcatatgtggcaaatttactttcaacatctgataaagcaatgggagacttaagatggtcaattggaaataatactatttctaaagcaaatagtattaagaatagctatctaaattccaattcttcaagtaatccattttctgcattaggaattggtactggaacaacatcaaatattaaatcaactgcatcaagttcattagtaaatccattaagctctattccaaaactttcaagttcttcttcagaaagtaacactggaagtactataactggaaatgattttactgaaatgcttaagaactctgatgaaattgctcaaatgcaaagtattcttaaacaaattaatgagaacagcaaacaaggaaatagtattctggctaagatgcttgaagccattattgatattagagataataaaagttttggtggaacaacagtagtcaataatacttcttcaggttcaaattacagttcttcaagtatttctccagagacagatagtatgttaaagggttattaatagagaggtgatttattatggcagatgaacagcaaaacgttgatgaacaacagtcacagataattggagatgagtttttccaagaaggtaactctaattcagattcaaaaggtggatttggaacaagtgtagaatatactgacggttttgaagcattaattggatcttctaagggtggttctggttcttatgctacacctacatggaatccatataaatcagatagtgtattaggcttacctttatactataatgatttagcggatccttcgggaagagtatataatcaaaccattattcaagatattcctaatatatacatggttcccggaattccatctattaatagaaatatgattgacgtagcaggaaaacgtattattcctgctactctttctcgtgcattaatggattttcaaaataatccaaatagtatttttaattttggagttagaggagtaaaaagtggtaatgaccttcgtttcatagggtttaaagcagattattctgaatactttaaatatgtacaaactatgttaagtactatacattcatatatggcaatggatggcatatttgatttatatagattctcagatgactttaataatagttttaaaaattatggattatgtttttatgcagataaatctacaactatttctgagtcagctgataatacttatgcggcttctagaacagcagaaatggtaagtgagaaagcggctactttaagggaagcagatttattatatcctacaggaagtacaacatctcgtattgttgactcaattaaagcggctaatccaattggtgtactagaatcattaggttcatttgatggaattatcactcgtacatcaaatgctttatttcgtgttgtaaatggatcacaattaatgttccctgacttttggcaagattctagatttgataaatcttataatattagtttcaaattttatagtccttatggtgatagagaaagtatatttagatatgtgtatgtaccttttatagcactattagcattagcattgccttaaatgacggggcaattaaaactcttttaactgctggaacatccttagagcttattagactacaacgtgactggtgacagtgagcgtgaatgtttaaaaactaataagattggacaatcagcaactagttaaaacttccatcatcccattaaacatagtattaatgattaatgaaggcgggatgatttacttggttaaaaggaaaactaatgaggaattcttaaaagaagtatctgacaactataatgaagaatacactattttatcagaatataaaaatgctaggacaaagatctctattagacatgaaaaatgtggtgaagtatatgaaagaagaccagactctataaaaaatatcacatgtaaatcttgttcaaggagaaaatatacacatagtgacattattaaaagaatcaaagatattgttagtgatgaatatactttattaggtgaatatacaacaatggaaaaacctactaaaatgattcataatctttgtaactatgagtggaatgtaaaattacatcattttattaataacggtacaaggtgtccaaaatgttttggtaatgtcaagagaaatacagagtcttataaaaaagaagtatatgatctttataaagatgaatattctgtattaggagaatatactgatacacactcgcctattaaaatgtatcataatgtatgtaatttagaatttgaagtacgtcctagtgattttttaggtagtcatatgcaaggctgtcctaagtgtaaagcttctaaaggcgaaagactaataagaaattggttgtcagagaataatatttcatttgaagaacaagttaaaatggatggacttagaaataagattccactaacatttgattttttcttacctgatcataacactgctattgaatttgatggaattcagcactttaaacctgttaaaaggtttggcggtgaggaaagatttaaaattcagcagaaaagagattctattaagaatcaattttgtaaggaaaatgaaataaggttaataagaataccatactttaagataaaaaatattagtttaatcctttctaatttattggaagttactagctcaacgactatcgaaaccacatcatttgatggaaggaagtagagtaccccacaagcgtggttacatttaggcataaatgtaagtatagtaaactaatactatatgggaaacaaagagcatgatgaaggcaaaaagctggagtgaagatatagtctcaacttctatggaaacatagagcagttcataagagaacgcactgaagtagcgactcagtggaaggttatgcgtcaagacggtttattaggatatcagcaaccattttttgtgagaatgtctcgtccgggttaactaaatagctcggcttatgagtaatcataagaaacaatcattctctaattgctggaaagtcttaacatgttgtgatgaagataatcagcagcgaagattattagttttagattgtgtaataaaaaattatatcaatagtaaaataaacaaaataataatttattattttggagttggtatgatgaaagcacttacacataaagaagtaaaagaatatatttatacagtaactaatggtgaatatgaattaattaatgaatatgtgaatgacaaaacatatattacgctaattcataataaatgtggaaaacagtatagtacgaggtttagttactttaaaagaggagatcgacatacttgttggaagatcacttgtgatgaagattttgttaataaagttaaaaaacttgttggagataaatatacttttctctccccttttgagaaatccagtattaaaattccttgtagacataatgattgtgggtacatttgggaaattacacctaataattttatttcaaaaggatgtcgatgtcctaagtgcaagtcagctattcctcgtggagaaaaaaatataattaaatggttagaaaataatcactttgactatgaacaccaattctcttttaaagattcatctataaaaaatctatcatttgactttagggtaaagttagacgataataagtttgttctaattgagtttgatggtgaacaacattataaaccaaaattcggtgatgatggaagggaatttaaaaaacaattagaacgtgatagaaataaaaataattattgtaagattaataatattccacttttaagaataccatataaatatagggatactgttgatataattctagaagacttctttactaataataacgttcaacgactatccgaaagtaatcgttagattatgagtagcctaaaaataggcaataggagtacggctcaagtgtttggagtgggtgaaaatcccttaaatggaaacgggaatcccctctttagagagggtgaagatatagtctcatctctatggaaacatagagcagttcataagagaacgcattagatgtagcgaatctagtggaagataatgtattttgacatagatatgggagtagtaacaagtttgactattactaaaggcggagctgatagtctttggacagttgacggtcatccgcaaatgattgaagttaatatgaacgtagtagatttatatccacaaatgatccaaattaaagatattggtttacttgcatataatctgggaattgcatcattcttagaaaacatggcaggaataagaccagaccaattaagttttcttaaatttaaatcattaattaatagaaaactatcaaattcattattatttactactttccttgatggaggttcaggaattaaagatagagttggtaacaaatttgctgacttcttctatgaactacaaggtaagtttaataatatattaagataaattaagaaagaacctttatttaggttctttcttaattaatacaattctaaattcctaacttttaaagaatatgcctaacagattaatagaaattaaatctgattggaggtagaattcttggcatttaaaaaaggtagtatttcacaaactaccaaatcgcaaaaaaagaaattagaaaaaattaaaaatactgaaattgagttaataattaatgaattagatgataatcaagtagtagttaatattaacatgaatagcataatagaaccatatgtaagaaatagattggcaggtaattcatcacatctatatgatccattaaatacttataagaaacagataagacgaaaattaaaagaacaactagaaaattatgaaaactttaaaatgggagaaggtaaaattactttcattattgatgtatatactgttccacctaagtcatttacaaaaagacagctagtatatgctatatttaaaagaattataagacctattgttaaaccagatttagataatgttgctaaaactgcaatggatgtttgttctaaattattttggaaagatgataatcaagtagtagaactcaaagtgagaaaattttatggggaaaaccaagcaacttatattaaattttacatggatttaaagccagatgaaattcggggaagagcaaatgaggaggaaaatgaactatggaaaacgctaaatctttagcggatacatcaaagtatctcaaccaaagtgatattgaaaatattgtgaaagtaaataaaattaaaaaggatattactagtttttttgatatggatttattcatcaataagatgagagatattattgatgaatctgaacattttgactttagaagtaaaacttcacgattatatattgaaaaagaaagaccaaattttattttaaaatatgtatcagatgaactaacaaataaaattaattctgtacaaggttctgatccagaagaaactgagtcaattcaaattgatattattactgaatacatctttaatgatgttatctctaaattttctacttttgttactgattgtattaaagacacagaaaaattaaatgatttattttcagatattccagatgatatcaaagatattctaatttcaaatatttatacaattagacctgatatcaagggaaataacattcaagtactttattttatttaataaaaaagattacagggggttttcataatgtggaaacaagcattaaaattaaaaggtacaaaagatttaattgatgaagaaattattaacttagatgatgtaattctaacaaaacctgtttacaataaagtaaagaatactattgaaaaagcaattgcacgtaatgaattagttactactaatttaaaaggagtaggaaagacaaccgctgttattaaattagctaagaagtatgatctgagtgtagttactcttcattctgaagtagaagaattatcagaaaagtttaattatggtagaatttattctttacagatgataactggaaatttagatgattataaaaaccataaatttattgtagactgcggaagaaatactgagggagtaattaatgcattaagaaataatggtcttaatgtaatttcaggtgttatatgtaattaataaaaacgataaatcatattatataatatgatttatcgttttactctatttattaaagaatctaggaagggcttttcttaattgttctccatcaaattctactaatcttagagtatttagtgtttccaatagagtataatcaaataggctttcagccattgcttgttcaagaatttcctgatctacttcagtcttttcattctcttttaaagccattttaacattttgaacctgaagatttttaaatagagtatcttttggtttaattgggctttcagattcactaatagctacagcaatatctctttcagttttaacaacattaactactttattggtaattacctcggatacatactcaacatacgttttaatatccttattaaatgattcactaacgatttttacatcctcttcattatctttaactgggaacattttttcaatatgatattcaattgactccataacactttgcattgtagtacttttaaccatttcaaaagttccatttgaaataagattatcagtaattcctttaacttgtttagtcatatattctttgtttaattttttaacatcttcatcaagaggtagagcgttatatactacactagataaaaaatgttcaagtaattctttagactgttgactttcaaattgtttcttttcaataagtctagctctcttttgtctagcacgcttattaccagctaggaaggcaacttcattatttgtcgcttcaatattatttataacgctctcattaaatacttcttcctgttttttaccttcagataaaacttcagaaaatccaagtgattgattaaaccgtctctttctaaactttgtatttttactggaaaatgtttccattaagttcaccctctttttagatataattaattgttatcgtatgtgtataatactgttcaacacccaaatcagtattatttgaagataattgctttcttaggtttaaatattcaggtacataatcaataatttcttgtttagtcatatctaagaatgatgaatgactagattcaatcttttgtacaactttatcattaattgaattaaactcaatatatcttatgatatcaaaattctcttctaatcgtctgattaaattagaaatagggaaaatttcttcatcattacagctttctacaaaatctgaaatatagcttttaattgcaatatctgtttcacttgtaacggcattattagcgtatatagtgagattaaggtcaagatcaattctatccagaccctttaatacatacttattctgagtactatcccaaacttttcctgtatcataccaagatgatttaccataagtgttataaaatttaacatcaatacttgtattattctcaagtttatccatattgtccgttagagataaaataaatttatccattaaatcatagactaacggataattatattgaaaataagtatattcaattaatggaatcgattttaatttaaaaccactttcagttggaaatatattactctcaattacattagacatatttgagaatagatttataggatcatcatttcttagtaggcatactacaccaaagtctgtcatatctggcatttttaatacgtctgtagtcttttcagtactaaaatcatttttatagagaattacaacatcaagattaacatcactatcaataaatgcatttttaacagtagtcatcccttcattatccaaaatagggcttgaatcaagagtataaagactattataaatattcaatttgttattgctaattgaattccacttttctgttgctagatatccttcatataataactctgtatcactagttctattgaaatcaaaatagccatatatttccccattagttgatttgagtatccctcgtatcttaacattatcatcaaaattgtcatcaattaagtttgttacaagtgatagattaaatttatatacatcttctgacatattatctctggttaaatcaaaagatgataccataaattgataaggaatacttggattaatataattataggataagctaacatctttatttgcatgagttttatagtaaatggatgataaaacaggatccttttctactttaataagataaggaattgcatatactaaatattttggattattaagatattcttctacctctaatttgtgccaaactataaaatagatatcattttcaatatcataaattactgcactattttctggaataatataattattatttgacatttcattattactaataaataatgaaggaatagttgttgttggcatcaccatattctcattgtttctcaaaagaatatatgaattccatagtctcttaattgcatcatttctctttttaatgaacttaatcttactgttatttatcttatcagaagaattaatcttattgaagtataagtctaggtcataatctgtaataagattatctctcactaaataatcttcaattaatttatttttaatatcagcataagaaggtttatcagcacctccagaagcatcagtaataggttgaatataaataggtattctacccatttcagtatcatttagatagttgataagaatttctccactaaatgagaaattagcagttgatccgtcagtagtaaatatttctacttctaaagttgaattaaaacgtggtctgaaattatttggtaaggcagaaaatgatatttcgattttattgtcatctataaaagtataataacaatacttttcatcttcaggaggtgtataagtgttattaaagtaagtttttaataattcacgttctccattatatgtgtagtatacattaaaataggcaagttgtccttgataattaatatcataaaataaattttccgatatatcttctgatgagacagtgattgaactagtatctttttccatttgataaatatctacacccatgaaaatatatttctcaccattatagttggcttcccatagttttagatagggattcttaactgtaaaaaatggaaaagtagattcatcgtacatgtatctagcgattacactataatcattattaacattatttgccttaaagattaattgaattggaaatggaatcatgaaattataatccccaacactaagcaaataatcattatttatgataaactcataagcactatcagaatctgatagattctcatctgaatcaatttttctaaattttgtactatttataacatcacttttctttacactaaagttaatcttcatatgtgatggtgttgccatagagatctgtgaattttgtactttagcaaaattataaatagattttggaatagatgctgtgtttaggaaatgttcatcatacaggatatttctatgataaatattattctttatctcattagacataacttcattattatatccaaataaacctgctttaagtaaactaatactcacttcatcattatcatcaattccaaaatattttttagcgatttctagccatttatcctcaatgctataagatgtattattgactgttataatactattctcttctgccattgtgtctcctcctatttaaagaatttaagtttaaatgttgtctttggatgtagagaatcattttcataaggatcagttttaacaacaagaactttagttgctttcacattagattcagtaaagttataaggtaataaatcattcgttgtatagggaataacacctttattagaaccttcagttgaatatcttaacgcttcagaatctaatgttgctactttattaaagtccataaggattgctggatctagatcttctttgaacgagtaactatattctactgatatttctggaatatcatgatccttgccatcagttgctaggttagcatagggaactgaaataggaactgcaccagtatatttagagaaatataaaatagtctcaccatcaaaatctaaaagaaagtagtaaattgaactcacatagtctaaatatctcttttttatagcatcttttgaaggtgaaaatgtaccacgtcttacattttcagtatattctacccatgccttatgtaacttaataatgggtagacttttatattcctcaaatttaacagtagtagtatcaccaactagactatctacaagtgaaattggtaaagtttgtttatatccatagaatgtttctccaacatcaattgtccttgccgctaaatccttaccatccattcctctaaatgcatttgttaaaattttaataaatggactaactgtttttccattagtagttagtgcattaaaaagatcaggttctaatgtttctaaatacattagaaaactatctcttcgagtgttaagtttatctagatttaattttggtgtagtaataaaaatgtatggtataccttttactaatacatcatgatcttttggatctcctcttctatatacatcatattctttgattatatcaatatgaggatataagttgaactcagacatttataaacctcctaaaagcgaatctttatttaattgttctaagtaaaagaaaactcatttttcaaatatatattataagaatgttgaagtaagtaaatatcagagtatatagaccttaataaatctctaaataggaagcatacaaccaccttgatgacgcttccgcttcttcaacatataaagatggaggaagataaactcatgtttaaggcattaagaacagtattgtcaatcattggattacaataaattgggaaccctaaaactaggtttatatactataacgccattagcgattaagttcgctaatggcaaataggtggttatatttttttatttttttcttttcctcctttgttaacaaataattaatgctaaataaatatcatttaataatgatagaaaggaaaggttgagaaacgaatggatattaatacactaatgaattttatctctgctttcggtttcggaaaagatttaaataaagataaatcaccgagaactaaagattgggagactgcggctgaaattcttggcgctacagctactgcaagaagaggtagtattaaatatagagcaaaagatttaattgctcactatcctgttttattttctgataatcttacttctcattcagtacagcttgtaaatcgtgcattagagcatgaatatgtaaatatgttaaagctacttattcaaaatgatggtgcagacggttttgaaaatactgcatcgtatttaaaaggataccatcaaaatattagccatgatgcaaatcttgattctcatttatctaaaagtacagatgaactagaaagaagattttcagagtctgtaattactgaaaatgatttaagagatgctaataaaaaattacttgaaagttttagtgatgatttaaaccttcaagtattaaatgattctactgttagtaaagaatataaaaatttattagaagataaaaaagatgattcaaataacaaaaaagttgaaaaagaattatctgcaaaaccaaaaattgataatacagaaattaaaaaagcaaatgaattaactccaactaatgtttctgtggatattgattatgaaactaataatggaacagttcataaaactatctcttttggagttaaatgtgttgctcaccttcttgattctcaagatatcgagtattttctcccaaatgctgtaattactaaaacaccaatcatgcgtatgattcaatggacatcaggggagattaaattctttaaagatttcttattttctattgatgaaattaaaagaactgctgttaaatcaaatgataaaaatagcttctggtggagaaaactacaaacaatctcaaaagtagctcatgctcgtccttctttatttgcattaagtaaaggaagaaaactaggaaaagccccaattcctacttctacaatggtaattagtaaagaaaacgtagacaatattcgtcataaacatggtattgatcttcttgcaaaaccttcatttgttaagaaaattatgaaaaatttcttcttaatgacttttatcattgttgatgaaagtattgaaacagtgtatatctttaatgaagatactggtgatttcagtcattattctttcaaatcattagaaggcttttcaaaacaaaaaaatattgatataaaagatatttatagtcttttaaaataagagaggtgaataaaattgtttgagaagaagttaactttattagagcaggctgatgaatttttaagtaatgcaatagtccgtaaagaaacgaattggagtccttataaaatcaaagtattagacgaagaagtaaaaaccactatggttgataatattgtaagttatatgttcaatgatgtaagacaaaaagcacttgccgttgattttgctattatagacaaatccaaaggtgatgtaactacattaagaaactttgatacaattgaaagagcaatttattttattaaggtaaaaggaacttttagacaaaaagataatgcggaaattgttagagctgtaaatgaactagattatgctttaaaaactttaattaaatataaaagtgattttaaacgtggatttgctctgaatgattctctttctcgttatctctataactctattgtaattgcaattattcaaggttcgtcttatctagttgcggaaactattgaacttatgaagagcatgcatggttatcaaataagagcaaacgaccaaaaaactttatttaaaaataatcatattaaatcaattagtcaatttaaccagatggaaagaaatggtcaattgtctaaattatttaaagaatcacacaatcttgctgaaaatgcccttttaaatgttggtaaggatgttgctaaacgtctaggaactcttagtggtgttactaaatggattgctgttcttggtctagttggattttcacttacatttattagaagtattattttcttgtattttaattcaagagttaaactatctcaatatctcttacatttaaaagaatttgtagaaatgaatgcatcaactattgaatcagatggaaagaaagtaaaagaaaaacaagaaaagattgctcaaactcttggaaaattatcagatcgtattagagttgaccaaaatgttgcaaatgatagagcaaacaatcaacttgaagattcaaatagaattattgcattagatactaaagattcagatgatagtactagcagtttaaatttatactaaaaaattgtctataaataaacatataattagtaaaattaaataataacctaattccgaagggagaaaataaataatgaaaaatctgtttctattagaagatgttgagttggatgaaacaaaagaagaggaaaaagaagttgtaactgaagcggttattgaagataaaactggtcttattgctcttactcttgaggctgaaatgagctggaataaccttcatactgaaatcgtcaaagaagaattccaagcaatcatgacagaagatgaagaacaggcaactaaaagtcgttcagaattctttaagaaagcaattgctttcttccaagaattatggaaaaaatttgtacaagttgttcgaaatctagtatctcgtcttcaagtacagtttactaatggggaaaaattcttagcttctcgtaaggaaaaattagctcgttatcaaggtgataaaactgtttctatctacaattggaaagttaaaggaatgcttggaattgctaaagaattcccaactaatcgtttaggtggcagtcttgtaggagctattaatcaagccgctaagagtggaaaagctgtttcagctgatgaaattgctaaaggattaggttttgaatccttctctgccattgataaaggtgtagttgctaaagctcgtggaaatgaaaaagttgaagttaaagttagtccacaagttctttcatctgcggctaatgatgtcaaatctgctaaacaaattctaggtattgttaaccaacttggaaaacaatctcaaggaatcatccaagaaggacgtaaagcggctactgctggcttaaatgcaaaagatcctcaagatcaacaaaaacaaagtgcggctgttcaaactgcaaaagcggctcaatcagttcttaacaaagtactaaatgtatttgttaaacttgaagttgagcgttatggagattctatgcgtattgtttctgcggctacttctggtggaagtgcaggaatgaaagctgataaaaaggcttctaaaaatgcggctaaaggaaaacgtggaaacgaactagtagtaagtgaagattttgaacttgatgaagaacaaccaattcttactcttgaagattttgaagaagatgaagaagagattgcactagaagatctagaggatcttaatcttgaagatctagaagaaattgaataatataaataaggatacgattctaatatgaatcgtatcctttttaataaagtataagggggaattattaatggaatttttaaatgactcaataatgacaactgatatattagaagcagaaatgaattttaataatatctatcatgaacttttatctgaggaaattagtttatttctaaatgaggatgaccctattaatcacaatccaaatcctactgactataaaatgaggataaaagaagttgcaaataaattgttgcaagccataatagatatttggattgcttttatatctagaattaaagatgtagtaaataaaattattatccatatgaaattagcagataaatttatggatcaaaatagaaaatatctccaagagtttgaaaagacaaacatgtatttttcagataaaaagattaaagtaagtccactattatttgatcgtcgaagatttgataccgtaatgaatgctgttagatcagttaagattgtttctgatgatattatgaaggtaaaaattagaccagaggatattagtaaggataccattcagaaagaattaagtatgaaattaagtaatgctaaaaaagaaatcaataaaatgattgttgaaaaagaagaagtaacaccaaataaagatttatatgaaaaaagtaaattattcttacttaaaggttatgatagtttagtagctgaatttagtaaaatgtataagactacagattcaattattagaactagtaaaaataattttataagtaaatttaatgttgatacttctacaagagatggaaaattagctgttaatggttatattgaaatctcaagaatgtgtgtttcaactgttattgaatgttattctagaatgcttagcctcttaaatcaattatatactgattcatttacagtatgtaggatgacagtagctgaagttaaaaaaagaagaaataatgactaatgtcattatttctttttaaagtataatttagtctgtaagtctgaatacccattacttcctacattaaatatagaactagattttagaatatgatattccccactatagttactgtagttattagcggcaaaattaaaataaaattggttattacatgatatagcatctatatcaatggcgtctaaagtgcatgtcaaaaaaattccttttttagaatttgttacaatttccttttctttatgtttattattatacctattataataaactcttgttttaatttcattagtaccataatcatttctcacaatatcgctgttactttgagaaataataatattatgagtaccaaggaattcttttctagaatcagaatagtttataaattttatattagagatatgaactttagctgagtagaaatccccagattctgttactgtatcattatagaataatgaatctccttcagcagtatcactaacaacctttatatgagtatttttatatttaccttctaatacaggtaaattagaattatcatgtttattaataatataatatgcattaaaatctaagaatattcttagtccataattatatattccataaacagtatcaagatatttcattgatctaataatattattaggaggtagtataatttgatcatatataatttgattatctggtttttcaaatataattggttttgatggaaatttttgtgcaagatataaaattgtactctcaatatcagagtcttttaaaactgtgttaactagtcttttattattcgataaatcttcttcactcattaataaaaaagtagttcttaaactaggaatctgatcagtagtactatttaaaccttcaggcatattaattggagaaatatccttatcaactggtataaaaattttatttttcatataatacgtaaagatagttgtatcattactctccaaattctcatgtttgtattttttaatggttattgagaatttacatgaatcatttttctgaattagataataactttcaaaatctaattctatatttaatcttaaaataggaaatacattattatcataatcattaattatttctatgctcctaaacatactgtctaatactattggattatcaattccgtcaatagcaacaaatccttctattaaataagaagtatccattataattacctccttataaaaaaaaagatagcaaacgctatctttttaaacatttacaatctttatcacatagtgaatgtaaactatgattttcttctcttaatttatctctctcttttttaatattagaaaaatgaaataaatgaagaaatattaacattaaaatcaggattgtaataaaacgaattacaatatatttcataatactattattattcatacttttccccttcaaaaacatactccaataagattggatatctgtcaaaatatttactatttacaaatttaactgattctgcatctatacgatcgaataattgtgattcaatattgattatatctttgttactaaaattataaagattattatttaatagttgcatattcttatataattcttttaaattttcctcacctaattcatctcttagaccattcaataggtctgtattattatattcaatattctttaatatattattatcaatacatttttgaataaaattaagagccttaatatttcccattttcttaatactactgatatcatagtctttatatcctgtaagagaaaccaataatgaatacatatctgggagaatagagaaataataatcctttttacttttttctaggaggatatcaataatatcttctgatgctacaaatcttgatttttcttttcctctaagttctaattgaagaattctgtcttgtaagtttaaatcttgataatgaattttttcatttgaaataattatattcatatcatttttattaataatattttgtttaagtcttgaattttcagataagaataaatgtggtactaatcttggatccatttcatctgttttgataaagtaggcatgtggtacatattcacaaaataatttaataatatgaacatttttcttaaccatattattaaataaaccaaaagtctgatttttatcatctaatcttttttcataaaaagaacttctatagtttttatcaatattagttaatcttgtatccctcttatcagaataatagaagacaaagttagtatacatttttaatctggaataaaagaaatgtctataatgcccaataatattaataacttctgaagcaatcataaatctttctctctgttttaatgaattcattgtttctagagtttgtggattgtataatgacttaactatatcccaaaaatcaataaaaatattaacagtattatattctctatcagtaccagttataattgttttattattaatatatggtttgactaaaggcattaaagtgtcatagcttaatttcttggaatgaagaattttttctaataataacatttttattctcctttattattgatgttaattacttctacatcatgattctccaatagtttcagtgtttcattaaagccatcatattctttatcaaatacaatatgtttaattccatgtgttattaattgtttagcacaattaaaacaaggtgaatatgtaatataagctgttgctccttcaattgaaacaccattcttatgtgcttttgcaatggcattcatctcagcgtgaatttcatgaatcaaagaccacttatgatgttcttcttgatcttcacataattcccatccccaaggatcaaatatatttttcatccctttacctaaagtagaatgttttttataccattttccatctcttttcataaatttatcacaacaattttcttttccagaagcagttccatttatacctactgctagaatattagtatctttttcaataatacagccaacctgtttagcagcacatttagattcaattgcaactctttttgctatgtccatatacattaaatcccatttgtttgtcattttatttcctccatattaaaatatacttgtttgttcttaattctttaaaatacataaggaaaaccagatattattctggttttcctttttaattaactttcagagagttcattaagttcagacattaagtctacatctaagcgatcaattttaaatgtttcttttgtaataggagttacatttagtgctttagtataaccatttccttttactgagaagaaatcatggtttttagtagttgtattaagtccattttctacaactggattaatgtcttcatcttcgaataaatgatcaaaacctaagttgtcaaatgcattattagcattataacataggaatgcatttacttcttcaactagtcctattttagaatagatttcttcagtatattctagttcgtttttataaagatccattaatagttcatttgcccattgaactaattctttttgtttagtagtatcaaatttttcaaatagttcctgagctaataatcccatatattgaccatgaactgattcatcacggataattaagttaataatttcaccactggctaccattttgccttgtccagctaggtataacggatagaagaatccagaatagaataagaatgattctagcattacactggctaccattgctttatataacatttcatctgtaatatctttagtaaaaatagcatcataatatttaacaattttttcggctttatactgaagattcttttgttcttctccccatttaaaaatctcatcaattagactcatagaacaaagtgttgagaaaatagctgaatatgatttagcatgtacatgttccattgcaccactaaaagcaataacggcactcttttgttcatctttaatatgaagggaaattaatggcattcctgcatttccttgttcagtatccaattttgttaaaccaacaagtactttgtagtatgcttcttgttcatccttactaagtactttattccaagtaacaatatctccagttaaatcaatctctttttctaaccaaaattgggaagtattaatatcccaaaaatcaatagtatattcatcagtaaggcggttccagttaaccgccttatgaacgatgggtacaattttactctctgttgtcattttatctagtcctctcctcttttaaatcaaactgcacaagattcgcagatgtcatctcctgatttacttctattacgtacatagtaaagactctttaaaccacgtttattagcataatacatatgaccaactaattggtctgtagggatatcgctattaacaaataaagtagtggaaataccctgatcaatatgttgttggattactgcaaccatgtcaataattttattttgatccatatcatatgctgatttgtaagaccattgagttctaccatctaaatatggcattggatagtatgttgtagaatcatggtaagttctattttcaattcgactcacaacaggcataatggattgagttgagttctgtacatagctaattgattgtgtaggtgcaatagcaagtctataagcatggtataaaccattttcttttacttgttctgctaattcagtccaatcttcttttgttggaacaaagattccctcaaataattcttttactttttgacttctaggtgtataatcattttcgatataacgtttaaaataattaccattagcatattcagaatcttcaaaacgatggaattttttatttttctcaatagcaatttccatacttcgtctaatactatggaaattcataattgcaaagaatacattggcaaaatctctagctacagcactttcatatgaaatactatttttagcaaggaaaccatgtaagttcattgcgcctaaaccaactgaatggaatagagcatttgcctttcttatagatggtgcatttttgatatcactcttatctgttacagatgttaaaatatccattgcaatatctacagaatctttaaattttttagtctccattacattaacgatatttaatgatgcaaggttacaactgattcccaatcctaattcatcttcttctccataatcattaattactgatactgaacttaactgcataatttcagtacaaaggttagagaatttaatttcaccaattgcttttaaagcatgttctttattagcatttgttttgaagaacagataagggtatcctgattctaattgagtcattgcaatttgattcattagtttcattggtgataattcacatacaaattttttaatatttggattattaactaattcatcatacattacatctaaatccatctcatctaaaggaattccatattctttttcgacactataaggagagaatgtatagaactcttcttctcctgattctagcaattgaataaatttatcaggaacaataattccagttgaaagtgttttcatacgaatgctatcgtcagcattgatttttttagtatttaggaaatgaataatatctccatgaaaaatattaagataaacggctcctgaacctttgcgctgacccatctgatcagcataagagaaactttgttccaataatttcattacaggaataacacctttagcggcattttcttcaccatttactggatcaccaagcattcttaatttagaaacatttgttgaaactcctccaccaattttagaaagttgtttcgattgaccttcaatatgactaattgagtttaatgtatcgtccatttcatctaagaaacaagatacaagttctcctcttcttgcttttccagcattaagaaatgttggtgtagcaggttgaactctttgttcaatcattgcaattgccgcttgaattgctttatctaaattaccatcaaataaatagagtgcaacaatagcaattctatcttggtaagtttctaagtaatattttttatctgtagtttttaaggcataagtgctgtagaatttggaaatagccataaatgattggaaactaaatggtacttttttaattgcattataaacttcttcaatttgtgataaactataatcttgaaatacattataataataattattcccaatcaaccaattaagacgttcaagtaaatttggaaacttaatagaatattcatcaatttcttctgcaaaagaagaaatagctaatttgtcattttctaactgccaaaaaccattgtcaccttttttagtgatactgttgttgtatttgagataatccttcatctaataattccactccttttataaatacacttctatctctctctgttcctcgtttttggaatttacatataagctttgcgttattatacctttcacatatataatcagcgcttttagcaaaattttcttttccccagtttctatcaccacttgcggcaactcctacaaggtattcaccattatgctttagaaattccatagttgaggttggaggtagtccattttgttttactccatcaatccttaaggtagttgtataagttactaatacaaatggctcttctacaattagatccttacttatacgtttagcgttagtaaaaccacaatcctttacaaaagatctggtgctaccagttctggtatcatatatgattaacatataattcctcctattaaggaagtgttattccttttgttaattcaattttagatttttctaccccataatcttttactatcttattgtaaaagatattaagaccattaaatcttgcaagcctattattcttaataatatacttataaaaatctaaggtaacatctttatctgaatatatttcaatatccacattcaagagtgataatgatgctaggtgatctaaaacaagtaaaaaggatgttccattaccagaaacgtataaaggtttgtcgtctttgttatagatatgattgtttaccccaatcaaatctatgattccctcagtcatgataattttatgttctgattcagacaagtctaattttttctttaaagcatatagcttttttgattctaccatatcaggaaacaatgaaaaattatgataacgaaatccagtaatttttggatcaagacttctacaaataatagtatttttatctgctgttaaaaaacctatagaatgttcttgtacctttttaaataagttcttttgtttatcatttttaattctctttgtaatatcaatattattattcttgaagaaatcaattggatttaagacaattttgtatttctctagatcactctcaataaaatcaatttttaatctatcagaaagatatcgtattttcttattctccaattctgtatactgattaggatagaaatttattattctatcattattaaaataattaatttcgctaccatacttatatgataatttctttttataagatatattagcctcattaatgtggcttattaaattataatcagcaattttaagtctgcttaggaaatttgatgttataattccactagaatgacacttctgacagtaatatttatatggcgctctattcattatgtaaaagtgagcactatttggatctttagtactgtctccacagaaaatacacctaataaaaatctcatctttttttcctgataagccacaaacacgtagtttagattttagatgtgaatacaagaggttattgttcatcaaatccttctcccatagtttagtactaaaaaactgttaaattatctctttaaaagatcttcaaaataaaaaatttaaaaggacaataccaactaaaggtattgtccttttaattagatgcacaatagcatatcaagaacttcttctgctaaatgatccgtagagaaatctacttctttattttctttattcataaacttagcatttttaattgtcattaactgaaggataacgttatttttatccaagatatttttaataggaagataactcttaagaagataagaatatttatcagaatgaataattttatcaacaagctttttacgattattcatttttctaacatttggtgcaatagcacaacttagaatttctggaataatactaaaattcatttccccaagttctctcgtcattccatataataaataaaagatatcattcttattagaatttactttaaatttattagaataataaatcttaactaaataaatctgaatagagtttaattctcttccattaataaattctttcattacttcatcagttacattatatttctttttaatttttgcaatttcctgtttaatactacattcattaattatagaattaccttgatcatttctaagcaagttaatttccatacgttcttgttctgatagttcctcatcatcagttgtttctgctttaagaggtttataactgattggatatttaaatgtaaataagtattttagtttttgcttaataactacatcaagatatgatataacagaactattatgttttaatttagggaagattttcttaataattactttaaaataatcttttacaatgatcattaagtcagtagacatattctttaaataagtccaaataactacatctgaatacttagtttcaaatactcgactgtaaataatcttatataatttattgagtgcattctttttaccatcatcaaaactcttaatgacttctttaaaaatatcataaactaaaacttcgttaatgtcatcgtcacaattaaagtcacagagtattggtattaaaattctcatcaatactgaactcttaagataaatcttattaagattatctgttacttgaagttcaatattaattttctttcctttacttgcttggttgagatcaagatcatattcttcttctacaatatctgagatgacatttaataatttctcattcttaataaataatctttcaatgtcactataaaattccatatgagtataattttcttttgtagccatattataccgaatttctaataatgaatatgctaagtcattatatttattaagtactaaatttagatcatcactaatctggtctaaacagttatagtatgatctcttattaattgagaaattattcatgtgagagatgtcatccctcccaaataatttatcaaacgcaatattaatgtctcttgcttgttcatcaaagcttacataattctccaaaatgtccatacctcctatattatttcatgatgtgagaatcttttttataatatatatttaaagtgctatattactttttcttctttctaacactcatatttttcttcatgtctcttttcatgttaggacgtttatttctttcttgaggatttttcttaagagactttctagttgtaggacgactattagatttctgagagtcttccttcaaagtttttctcacttctccattataactatttttctctttcttcgcaactcttttttgagatttcttcttagacatttcattgttcttaactctattatattgctttaacttttcgtcagttgaatcaactgctttaagtaaaagattcttagagaattttttaatattattagtgttaataacagacttaacattaaatcttctatgcttgatatataataatgcaaaataaacacttttttcaaatccataagattgaattggatttcgtgtattaggaggttcattcaaagctttatcagatatttttttcttaaggaaatcaatcagaattccatcttgattatatacataggcatacgtaaataaaaaattaggtgcattactaaataatcttacactatagttattgaaagtaaaatctgagttagcctgatcatttattggagaaaattgtaatacaacatcataaaataatttttcatatgtttctgatggtattttaaaataaaaataataaatatctttatctttcattatttctaatttaaagtctttatgttgcttcatcatttcataaaatctatcttttaggttttgaatagtgatatcccttcttgcaaagtaagctgaatatttaccagaaggattttgtaataattgattcatcgttacaatcgccactatatttcctcctttagaaaatatattgattagacattataaatgttttataatgtctaatcaatttaagattattgctgatactgaacagaaacaaattggttactagtaactaaaagaccaatgatactaaaagtagctttcattatctcaatatcagtctgtgttgagttaataattttagtattattaatatcttcaaattcatcagtcttaagattgtaaattttatcattaacaatacactcagaaataatatcatcaattagattttcattatcttcaaacttattcattaaaacagtttcaaaagaatttctgaatgcttgtttgatcttgatactaaattctttaataaaattatatttttcaccatcattaaaatatctaaataatgatttgtcagaaataattttttcaataatattatctagattcttatcaataattctaggaataattaaattcccaccagagatataaccattacgcaaagctgaacggcatgcaaagactgcatcttccataagaaatttacgagtttctttttctaattctgtacttccaccgataaagaggttagcaatagaacaattcaaatctgcaattctctttttaattttatactcatcttctgtagtatcaatatatttttcacgtttactaatttcttctaatcgtgtatttaaatactcaattcgctctttaatcgcttgaggatctccttgtccttcaataagctttgttgtattttcattaactgtcactttattgcattttcctagtttatcaatatcaaacttatctaattgacccatttcaaacttatcataaatagtagctcccaaataaatggcaagatcttcaaatgattcgcgatgatgatcattagcaagagcataatcaattgccaccatgtcttctagtccatctcttctatgattgattcttaacatattggctatttctgaagaatatcctttggatataataactaatggtttatgtctatcaaacataacacttcccattaagtcgccaattagatctgaatcatctgcatctaaagtttgattggacataaatactaaagcatctttaaattcagtagttactttatccacctgattggcaaaatcattggtaatataacctctatttaattcaattccttttgttacagtataactatctactacgtcatcagataattctaagttaatgaatccatcagcaccaatctctttataaatatcatatataatttgaccagctttttcatcattattattagatactgtagcaatctctttaataatatcaaaattttcttctgtgatttcagttgcttcttttttaataaattctactaatacttcttcaaatttagccaacgtgtcaataatatctttacgaggtactttaaattcagagatcaatgagtctaattctttaaatagagaatttgatactacaatagcagaagttgaaccatctcctacttcacgtactaaacttctgctaattttctttacaatatctaaaattgttgaagcaatttcattatcaaatttaatcttatttagaatactatatccatcttttgtaatagcatggtttacagttaatttatcttgaataatagaagttgaaccatatggtccaagactattagaaagaatagttgtaagaacatttaaggtttctgttattacttcttttgtcttaatttgatttgctacatttgaattaactgacatattatatttccccctgatttatctctcttttgatttggatcatagaaaattattttagtgcaaatactatttcattttccgataataattttaattcttctacatacttatgattattaataaattctataattttttctttattttcatctgacaataatttaatatgacaatttttaaaagtattgattgaattatcatcagagaggttctcacatagaaaacctcttacaattttataacattctataccatctagtatttcaataatttttagagcattttctctatattctaaacctttaaaaaaattctctgatttatatttttcattatttgttttagttaattcaccatagatgatataattttcattgttcatctttccctctacctttctttcccctcatgagagtaaaagaagaacatatatactattttttgttagtaatagttttaggtttttcttttgaatcttgttgagccttcattatttttttagcttctttttctacttgttttgctttttccttctccagactgattagcattgatagatccatattgatcatttcgctgatacttattttaccatcaaataagtccaaaaggtataactggtatttagcatccagttcagtctttcgtttaagaccaccttttaatcctcctgaagaagacgatgaaaaagcatttcttccatatcgatctcgatatctcctaactgttctccacaattactacatttatgagttttaattttataatcaatagcatatttttctgaacgatcagaaattgcttgcgctaatgctttaacatcttccacttcaagattcttaatgatttggaagattgactctttatcatcaatttttacatattttactttattattagctttaagttgttgaatgtcaattacataaaggtttttaataaacatcattgttgttaagatttgctcattttcttgtagcatctctggatttactgagccgatcaattctaaatggtcatacaatgaaggtgtttgaatatctaataaaatcttatcatgcggtaatacaatacggttaaatttattaacaagtgatttttctagcaactcatctacattactaacattcccaataatctcatgtaacttagcaaaagtttcttcatcttttacgtccactaatgtttcattattaacgataacagtattagttccttggcaatgaccgcaactaatttcaaatgtactatcagttgggtaagtttgacaatagatgccataaagtaaagtattaaaatcatagaatgaagtaatttttaaccaatctttataactaatttttcctaaagatgttgcattaattttactatatacaatcttataaagtttttgtctagaagcagaaggagacatagtggaatttacaatagaattaatatcagccattctaattgattccatatgtgcgatatatgccgattgattggcaacaacttggaaagtaggttttccatttagaataaaatcaatatcagatgtactttctaatggactcttttcagaaaattcaatatttgatacatcaatagtaataccactaaggatatctcttatatctgaattatctgatgttttctttttagtacttttctttttcgtttgtgttgatgttttctttttagtacttttctttttaggtttttcttctacaatttcttcttcaatattttcttcctcatcttcgacaatacctagttcttcatgtagatcttcaatttcctcttcactttttaaaccaaaatctttaatctctttttcagaaagttttttcataacttcttgtcttttactcattattttgtcctccgttataaaataattttagatataacttttttattactttgcctaccaaatataatagtaatttgatcaggatcattagtagtctgaatatctcttgaaacaataaaggtaaaaacaagtattttagatcctctatcattatctactgtatccaaatcaaattgtattcctatattggttggtataaatttacttatttgattatcaactttctcttttaattcttgttttaattgatcatcaataaattcaaattgataattttcgatacctacgcctaattctggttgattaggatatgtaccttgttcaattatcattaagttttgaatagtctgtgctaatgcttctaaatctttcctctcagcattagtgttatatatactcttttccaaaaggagttcactcttaaatatatcatcagccactatagttctaagacctcctccattatttcaggtaatattgaaatgttaacaattctccaaattataaaaaataataaacaatattttataagacataataatgggaaagacggtgaaaaataatgaaaatagaaaaatgtccattttgttctaataagtataaagacaaatcttttctttgtaatcatttagaaaataaacataaagaacagctgaatggtctttctccagcacaggtatattttaattttaaatataataaaactggtggaaaatgtattatatgtagaaagtctactaaatggaatgaaagtaccaatagatatgaaagaatttgtgatcgtaaagagactaattgtagagagaaatatagagaaatgtttaaaaaacgtatgatgggtaagtatggtaaaactacattacttgatgaaccagaaatgcaaaagaaaatgcttgattctagaaagatatctggtgaatatacttggacaaataaaaaaggtaagactaaatatactggtacttatgaaaaagattttttagaatttttagatgtatttttacattttgaaccaagtgatgttattagtcctgccccacaagttttttactatgaatttaatggtaaaaaacacttttatatgccagatttttatattacatcaattaataccatcatagagataaaagcttttgataataaacattatagagctagagatatagaacaagaaaaagcaaaggataaagcagtattaaaaagtaattttaattatattaaaattcatgataaagaatatgatgaattttttgattatcttttaaaatttaaagaataaagaaataataaattaatagggtaagttaaaaaataaagataactttttcttaatagaattagttatctttattaaatttattatttttaataaccgtattaaaatattaaaagaaatatatattatataattgaataaataggagaactagggggttcaattattatgaaaattatactggggaattataacaaagataggggtactactatttcatctactgaaggaaagtatttctatcaagatgtatcaaatgatcaacaagtatttgaggtttataagaaatttatagatgtagctgaaattgttggatttgatgtattacaggcacatacacattttaaagatactagtgatatttgggaaattatacagattgaattaattagagatggtattattgaggaatttaattatgatgaagagaattattgtacttttcctgagatacgagacattattgatgtatcaaaaatgcttattatggataagctagtaaaattacctatgtatcattattgggaaggacaagtacatattgggaaaaccatagaagaagatccaagtagacttaaattagctattaatgaaattcttattaaaccaaaaacaagaatacttgagatgagtgtatatatttacatttatattgatggacaaaggaaaattatcgacctcctagaagattttacattagattttaattatattagagataaaaatagaaaattatttaattatattaatagagttattgattatgcaagaaataatgttgatttcccagtgaactttgtgagatttcaaatttctaatgataacattatacgcaatatgaaaattagtgatcgaaatgctgaaatgcttgaatgtctttatatgaaagtgcaaaatgacaaatatgaaaataaatatatactacctctgtataatataaaaggagaataataacaatgcatcattctttattccaaataaaatctaaagaaaataataagatttataatgtactaaagatcatcaagaatcaatacatagttatggaagttagcttatcaaatattaatgatataagtatgaattattttaaaaaatttattgatttaatagattatttaggtattgaaaatatatctaaattagataacgataatggattagtgtttattcaagagataatcaataataactattttaaagtcattaataaaggagactattcttatattactttgccttttattaatgaattggaagttgtaatgtataagctgttatctacaaataagaatataaaagatccaagtagttatactataaatagatttcaagttaataaaaatcctaaacaaacagcaattcaaggagtattatcatgtgaattatattcttttaatgagaaagtaagtgagatagtcgttcatattgaaatgagagatctaagaaaagaaaatagggagttatttaatgatattaaacggttaattttatttacagaaagaaaattgaattatagattaacagaaatgagcctagaaattatgctaggttcatttctaactaccatttctaaaaataataatcgtcttgagtttagggatattattgatactatatttcttgaagtaaaaggtgctacttctacacagtttaatagtatattgcctatttcaaaataatattggaggaataaaaatgtttagaggaaatgtatttttaattgatattttatatgtaaaacatacaggatatgaagaaaaaattgaatatcatttcaaagaaaatgagtcaatttttgattttgctcgtatactacctatgactgtaattgttgaaagagccactaatgttttaattcgtcatgaagtaaaagatggttttatttatattccatcagttataaaagaacagaataatatatttgatctatctaaatatgagctatttaatattccattgaatgacaaaaaattagatatagaaatacctagctatacaataatcgacagttcaagggttaaaaagaatggaataaaactcattgaaaaagtcactaaacagattttttctaatagaaataattatataagtaatgaagagttaaaagtcatcttagacggaattaaacaggaagaatttaatcgtatatgcaatttatctaatgaagagagtcgttatgaattaatatttggtagcttaaagtctacgactggaaaagatgaatatattaacatgaaaagtagttttggaaactttattttcccatctattgataaagaaactattaatattattaaaaaagaattttctaataaaattttaataatagatagcgaaagaattaataaagtaatcaataatataatagactttaaactacttatcaatttaaaaaaacaaataaataactccctttagggagttatttttttttatattttttaagtaaaattaaaatattataacaaatatatattatataattgatggaggtttaagaaaatgagtgaagaaaaagttttagaaaatcaagaagaagaagtagtagaaaaagaggaagttggagaaagtgaacaacctcaattagaaggtgatattgtacaatttacagttggaattaattctaatcaaacgtataacgttagatcaacagttgaaactggattagatctaagagaatatatgcaagctatcgcaactattaaacttaatacaattattagcatcttaagtggaaatgaaaagaaatatgataatttgaaaatttttaaagaatttgagaaagaaactttatcaatggctattgataaaatcttggaaggtttctctgaaaaagaaattcctgatattgagaaaaaacaaattaaaaaattatttgctgaataacataaaatatcaagtatggacaacagttcatacttgatattacttaaacctccattaaaataagtatagcggatatacttattttatctttgttaatttccaatacatctgtcactaattatctaaaatttttagtaaattagtaacaaaagattgacttatactcaggaggttaacataatgaaaaagagattattagttattgctggaccatcaggctgtggaaagaattatatcactgatttattaattggtacttatccagaattatttcaacagcttccacaatatactactagggagaagagaacaccagatgagaatacttatcactttattagtaagtctcattatgatgtaattgaacatgcattaattgctaaaactgaaattaatggataccattacgggacagttccaagctttgaagaaaataaaatcggtattattattgctaataaaaaaggaattgagagtttgagagaatacctttctaataacactgataatgtagaggtattttatttgggaattgattcggagcaaccaaaagagagagatgaaagaactaaagaatatgtcgcaaatgaaagaaaagaattaaaaccaattattaatgattggttagtcaatattccaccctataattatattactgcggaagatgtttatcaatacttagagaataaaaagtttatttaaacataaacaatcgattataggtttattcctataatcgatttagtttgtcatagggggaggttggattatgacaaacaatttataccaaaaacataattatctaaataaaagaattagttatctcaaaaataatattataagagaatatgatatgaccaatgctggagtcaatattctacggaaaaataatgttattacagaagaagaatatcaacatttaaattcaatggaaaaattaaaaaagaataaaacagttggcttattcttaaaaaagaatcctgatattagtgaagcattgatcaatgagtttgttttaattaggaaagagttatttgagaagaataatattgatgatgatgatatcttatcaattaaaaaagatgcagtttttatcattaataaaaagttaaccaatttagaattaaacgaatattataaattccaagaaaagaataggtatattagttatattagtattgataataaagagttttattataaatcagatagaactctagatattaagggttatagtaaggaaataaaggaattccataaggattacttatttaaagatttagaagaacttcttttcctagatacacataatgaagaaaatgcactatttgagaaattaatacaacttaaatataatttcgtaaccagagaattaccttatcagtactatctagatttaatttatggtaaatatttatatggtattttaaatcatatgtattacttggacgaaataacagaagatttaaaaaaatatgttctaatcaataacaaccttaatttcttacttagagtgataaatattctattaaaatgattaaaacagtagactgaaactctactgttttaatcgttatattattttactttttttatagttgttctattaagttccactgtaatctcagcaattcgattatataccaaaacagtaacgaaatcagttaaatcccgaatatagacacttaaactttctttataaggttctgatagttgttgcattacactatgagtagtctcagcagttatttttataagaatatcatcatttaataaagatagactagtagatcttctttgatatgggattaattttaaatctctagatttgttacaaaaataatctactaaaaacattagatatttagtatctgactcaaaatctttattagctaattttttttctatgttcccattaatagaatttaatcccttacttttatctaaagtacctacaatcttaatcataaatttagcgaaaaaaagaataacaaaaaggtttaacagtacaattaaagcaattaatagttccattgatattcctcctataaaaaaagaaggactcaatgtccttcttattctccatttcttatttttaaagcacgttctttatattcaacggcaagactatctgccatttcttggtagtaagtatatggatcatcttttaatgtaatgttctttcctttgtgacctctcaaccaattaaactgtaatatgatacgtttcctggcaaaataaattttatattcatttaataatttccataaatctagattttttatttccccagaagaatttctccatccatttttaatccatttatttaatctatctctagcccctagtatagtatattctgaatctgatataatttcaatgactcctatttcattaggattcttttcaacaaaatctttcatttcttttaaccctaaaattacacccattaattcattataattatttgttgatttatcaaaagcttttaatcgtttacctattaatttaaattcttcatttacaaataatgttgcacatgtaccaagagcatctggtttaccattatgaaatgaagcggcatctgagaaaatataaatctttttcatatgaatctcctcccaaaaatatgtattcattataataatatatatttgaaacatgtatatgttattaataataattaaaataaacaatataatatttcataatactataaggatggtgagaaaaaatgttagtaccaaagatgaataatccaagtcttataaatgaagatgagtcttatgaagttgtaattgattctattgatgatcgtgcagacttttttaattttgaaattacttctaatgagaaggaaagactaaaatttatcaaacgaattgaaaagataattagacgttcatttgaatataaaacttatattggctttttaaaaaatgaactagatttgacaaaatgtactttccttccaatggtagatacaaaggaaattaaaaaagttggtttagaattccatcactacccttttactctttttgatattgtaagcatagtactagatgaacatattcttgttaatggagaaaaaagaattaatccatttgatattgctgaagaagtcatggaattacattatcagaattatatagggttagttccacttacaaaaactgttcatgagctagtacactctggaaagatttatgtaaaccttaactatgtatttggtaactacactaagtttattaataagtatgagtcagccaatactgaaaatttccaagtattattaggtaatttagaacaacttagtcagaaagaagatagagaaggaagtattaatggtgatatcctagacaagagtctattaaaacttaatattaaagatattgaaaatcctaataagattgaagtagaagatgaacttcttgcataaatattaagttttaaaaaatttatttctcttttttattttaaaaattaccctgcatttcaaacaatttaatacgtgtgagagtagcatcctttcacgatgttcacacggaaggagatagtgagaggtctccttcttactcaactgttcgcaatgtgatttctccatttagtactctgtgcatacctctataggtaaactctttatgggatgatctttgtcattggtttttgtttcacctccgcattagtcactgagaggtttaccgatcctcttggtgacaatgtgactgttctagttgttaatgttggtgcaattccaacaacagtcaccaaatctaaaatataaaattagcttttcattggcggaaaacacttttttatatttaagaaaatataaccatcaaacgtttctattccctattaatagttagatgataacgatctttctattacatccaatccgatactccttctaatttttatcggtctaatcaattctgttcgccattgatttaactaataagatttagaaggggtaaattattgaaaggaatgatttaaatgaatatagtacttgaagctttgcttctaaaaaagtttgaaaaagaaattgatgcattacatacacatttaaaagctgaaatagaaagagctattaatatttataaaaatttagctattgaagaactcttagattataataaaaattatgaactacaagaagaattctcttctccgtttaaaagcaagtggattaagagtattgaatatcttacacatttaaaaagatctatgaattttggtcaatttaatattattaaagcagatttagatgagttagataaccatctttcccatccaaaattaaatagagacaagactattattcgttctttaattgatgaaatattaaaattttaatttcatcattttttataaaaataatcctacacttaacatataaatataaggacgacatattttaaaaatttgtctatggacttgttaagtatggcagtatttaacaagtctaaaaattttattcttctagattttattgggatatagccaagtggtaaggcagcatgctgttaacatgcctattcgtatgttcgaatcatactatcccagtaaagtctagaagggtttttactgcctatttaggaggtctataatgtttaattttttaataatcttatttgatatatttataatattatgtatgttaccgtttctatttttatttaattcaatgggaaaaatgatcctgctaaaaaatagggaggtgaaaaatatagatgttaaaaaagattagatattttattaaatcagatgtagagttacattgtcgtaatatttgggaagatggagttaaaaggattgatggttttaattttataagtaagaaaccattttctaatagttatcagtatcatgcacctctaactcttgaatgtacctatagaatgttaaaactgattcaaagatctataaaagaaaataagagatcattaacttttaaaattaatcatggtatgtcatgtagtgaatctattactatatggaaaggtagttttaaaaaagctgaaaaattaatgtttgatttaatagaaaatattcaaaaataatattaattttcaaattaaaaactaaaataagtaaactagatattagataatctagtttacttattaaataatggagtgaggagtataaatgacaatgttaacggttaaacagagaatcggaaatctacatgataatatcaataatgcaagaagtaatatagtaagtctctcagacaatattaatgaaattaaagaaatctacaaggaaataaattcttctaaatcatttttacaagatgttgaacaattattggctacaaaatataataatgagattaagaagattttagaaagtatttttatttttgataataaaactttaacaggtttccatgaaaatactgaaactaatgtagttaatgtaagtctaaatttatttgataaaataacaaaagatattgatgaagaattttttgatattaatatattggaaattttatcttcacagagaattgaaattgactttgattctagaattattgagaatgtttcaatgaaatcaactttggaattcatatctagtattattagacaaaagatagaatcaaaagaagtattaaatattagactaaatcataatttaaaaagactagataagagtattaagatcacaaaaaaatcaagagaaatcaatcaagaatccaagaataaaataaatgagcaaattattgccaatgaaatttatatcacaaaggcaaataactttattaaagatccacagttaaatatttatatccaaaaactagagaaagaaatagaatctagtatggaaaaaataaagaactacttagatagttattttggaattgaattttttattcaaagtaaaaataatagattaagtgagtcattatcctctaattagtttataacaataaattaaataaataaaggagggttattaatgacacctgaacttatgaatttaatttattgtgttattctagcagtagttgtattagctggaggttttggagttagtgtcttcctaaaaagacataaagaactagctccagtccttcaagaagtaactaatgctctcccaactgtattaggggtactaaaggctattgtgactaagggtgtttcacaacatcctgcggctcatgcttttgatgttttacaaaaagtggctgaagttgccgctaaaggtgtagagcaagtgagtcaaggtacagagttgcaatctgaagaaaaattaaagttggctaaagaaaacttccatgctattgctgaaggtattggtcttaagccatctgaacttgatgagaaggctgttgaaactctcattgagaatgtagtatttcatttcaacaaaaaataataaattgctcctataatcctaaaagattataggagtttttaaatatatattatttctttgtaattagataacaaaaattaagggggaataatatgaattattcagtacatattgcgtataaagattataatgatgctatttcaaaaatgcagttatggaaggaaaacaaatactatctatcaaagtttattaaggagtaaagttaatggctgttagtgatactttaggaatgattatgggtgtattattcatattcatatttacttatggactagttactgttaaaactaaattagagaaagctatattctcaatatttgcattgttatttattggattctttatttttaatattactatgttagtattagaaacaacaagataaaataaaggagtgattaataatggaacattcattttgtccagagtgttatgagatgagagattttaatgaagtttttaaaagtgatacatttaatttctatggacaagaaattgaaattactagtcgttttctagaatgtacaatatgtggggaagagattactgatccaaagagaattgatgaaaattttattaaagcttatactaagtataggaatgaaaataaccttcttcattcagaagagataaaaaatattagagaaaagaaaaacttatctcaagaagaatttgcagaaatacttggttgctctaaaagaactattcaaagaattgaaacaggagctttacaaactaaagaacaagataaaaaaataagagaattagtttaaataactaattaattgggagagaaaacaaatggcaatgacagcgcaaacagaggaattaatgaaaatgagaaatttacgttctagagacattcaaggtagaaaggcaatcctaactgaagatgttgcattctttacttctgtttctagaaatgataatagtcttgttgtatttgaaaaaggaacagaggttactggtgtttatagaatgaccaatactgatttatatatctttagatttaatggtctatataattttcctattagatcatataaatttgaatggaaagacgaaagagaagatgataatttatataatgggggaaaagactttacctactgtactgaatgtaatgaagttcttaatagtgaagatgacttatatccagatatgtgtaatgaatgtggtacagaaaaatcatataattttagaaaaccaatgaaatttagtaatgataatgatgaattttacgaaattaccaattatgaaccagtaggatattcaattgataatgactaagtagataattcatggggaatttaaaataagaacaatcttatatagaggttgttcttatttttttttttatatgtttaaaaattatttaatggggagaattataaatgagagaatctagaatagtggcgtgtaaaatatcaacatctatttcttctttaattggaaatattactggttatgctagatattttttatctacaaagtttcctcctgatttttttaaagatactcatattagtggtgctttaaatgaaataagaatggaaaatgtagatattgcaaaattaagaaaacctactctaattatgacacctgaatacaatggtgaaacaggatttatggaattgttaccgaactggcatacaacacaatattttacttttaagaatccaagaaagaaatacaatggtgtactatacgataataaaaatgatatttatatatactcaatacctgatagaattaaggtaaacttcaatattaaaataaagttaccatctgaattatatgcttatgatgtattacattatgtaaaacaaacatttgaaactggtggttatttctatttaaatgatgtaagtttacaaacagagttaccaaagatgtatactaaaattatagaaaaaaaattaaatttagatccatctaaaccagatgatagagagaagttagaggaatactacttagctaactcttataatgggatcacagaaaaaattaatcagtcttctggcaatagccagtatgcatacacttataaaactaatattcttgtaaatattcctgaattacctacctatgagaaaaatgagaatggattaattacagatagtactactgtaaattttcctttttcatttgaattatggtctcattcaaactatataatggaaactaaagatgatccaataatagatacaattagtagtgaaccaactattgagggaagaactatgaaatacgattttttcctacctactcattttataaaagaacaatatgatagtatgcatctaattgtgcataaacaattccttccagatattaatacagaagttgacatactagattttagtccactcattaactccgagttaagaggagttatagaggaagcactaaagcaaaaattagatatgtcaaaactcttgaaagccagagtattagtagataacaaagagatttatgaggaactctttaatgtggattggaagactcttaacttaataacgaaagaaccaatgtataatatgacttatacgctaatgatttatggtgatttaaaaattttaaacctcataagtaagtatattgcggagggcacaaaggagaagatatctgaaatagaactataaaaattagaaagatgggattcacatgaaattagaagagctttatcagacacttaaaaatgaatatctttcaggtaaattttatattgaagataataaaattaattggatttacagtactgaaggtgtaaaaagtgctgaagaagctgaagacagatggctttcctttctaggtgcaaaaattaccgccgagaatatcattgagggaacaaactttgaaattattcaaaagtttgaaagtaataataagattggtttttcaattagagaaaaactagtcaaaaagaaacaagaatgtttctactattaaaaaggataaaatatctcctatttggagatattttatcttcataccgtattatagtaatatttcaaatatatattatattaatgttaataatagggattagctaagagaaaggagaaacagtattaatgaataaattatatttaaaattacataatattaaaacataaaatatggaaaagaagtgcataaggagagaataaaatgagatcacaactatttaaagatttattaaaaaagtataaagaagataatgagaattttaaattaagtgtttgtggcagagagtatcgaataacagatgttgttaatgctattgagatttttagagatgttattttgggaactaagtttgattgtaattttagtgtatcacaagatggaagtataattactgctgaaatttctatatttaagattgaagacaaggaagtaatctaaagagataatattgggggaatataataatgtacagagcagataaagaattctattcaaagaaaatcgataaaatgatatctaatgtaattgatgattatactgatgagccgtattatgaattctttgataaaggaattagtattgaaagtctaataagagaagagaatagaaataatcctgttgaaaaatcatttttagaagcattaaaagagttcaatattaaattagatgttccaatgtttgctcatctaaaagatagaaatgatccttttgatttacttaatgtatttctattaaaagaatatgtagtgatattgagttattattcaatcggaagtgtagttgatacagcatcaatttataaactaaatgatcctaaaggttattttaaagaagaatccttggatgttgaacctgaatcaattgatattctatttgaaagaaaaagaaatgaagaatcaaaattaattagtgtggaataataatggataagtaaggaatattccttacttatccatcctattctatttggaggtataataatgataaaaatagaaacaaaaaatgatactgcaatgattaaagatgaatctcttaggaaatcaaccgaagaagtattaaattattatttaagtgcactaggagtagaagacctaaagaataatgaaacagttactatttatgctatcagggaatctggtaaattagaagatcatgttgttgcaatggaaattgaatatattgagagacaaattgggaatgttgtttcaataaatgttatagaccatgataaagatcataatatcatctatataatcgattataacaatattgtagatccagaaattaaatcaataagaatagaataggagttactataaatggtacaaatccttaatttaagtgaaggatcagcaaatgataaaataaaagcagttgaaagattaagagataaatttgataataatagttttaccttatatactatggaaactaagataatgggagttgaagatagaataacgagaatctatctaggtgacttattattaatgcatgcatctaatcaccttattgtacctgataaaatgggaaatcctatgcaatccagcaatggtgtaacggtatttaatggatctagagaacaacaaagaatattagaagttggtattggtggatgggatgcatttaaattctggatttccaatactaccttcttatatgcatttagatgtaaaaattttagagatttgttaaatggttcaaagcaaattgatccaatgattaatagtatcttttataaattttttaaaaatccagatgttagagaacaatttaatcgtgttttaaatgaagctcgaattaatattaaggagaattaatagctaaatatctcttttaaaataaaaaaagagttacaaaaaagaaaataagaggtaaaatagatgatcaaagatttaaaaactattgctctatgtttagttgggtttattattatattctttataattaaaacatttatgtattctaatgaggaagaagaatgtttaaaaagagatcattatgtagatgactctaaatgggaagaatattgtaaaaataaatagagagaataatcctatatcatgcgatataggattattttttttttatgcatagataagatattcaattaatactgttttagtaagagaagtaagtgactctgagtcaaaagttactcttgaaaatagctcagtatctttataggtattattagcttcatcatactcagcaaatactaagcctagttcattaatgagatatcctctagtttcatctgcattaattttaagcataatcttttgataaacttcattattttctttactgaatacccattgaggttctacttcaaaaactttaccataatattcagtagttccatcagatcttacttcaggcagataataacgttttctttgttcttctgaaagttcctcaataatagaaggattattttctttttcaggagtttcatgctttgctggatcctgaacaacaaatggaactggctttgctagatcttcgtcactatacaatggtgcaaaaggttggaaaggtgcagattcaatatcagcgccacctgaacctactttaaataagcaaatacttctatttaagttaactttataacctgaagcttctgcatcaatcggtttaccaaataaacgctccaaagcatatgttcttccacgtagtacaattagattatctttttctaaaattgtatttccaaattcatccattacttttactttaccttttaatcccatgccagaacttggctgagaagttttatctccaatattaatcccatcattgaatttcaatttttcagtcattattgaaacctccaatttattatatttacaaataaatgtttactattctttaaacttcctcataaataaccttatcttcttgattctcttcagatacagttatttttactgactctttcaataacatagtatcattattgtttaaactagactcataattaaagcgatcagataatttatagatatcatgttgatttatttgaatatctgaaattttatattgatcatgataacctataccttctattggtgagtgaattgtatgaactattcgatcatcattgagaaccatattagaatcatctttatacaattgagattgccaccacattacatctcttatatttaatggtactttgatattaagattagtatctaagatattagaaatatctaatagatcgatagtgcttgcaaaactatgatctgttgttgcactaaaatcatcaaataatttaagagtattaaatgttttatcatcaaatgaaaatacaatattagctgataaaagatcaatagtgtatgatttaaaaatactaataattgtataaagatatttttctatatatgaacttagtccaataaaattattatttgtaaaatatcttcttactttcggatcgctaatatagtttccaattgattcagttaattcaaatactctgtctttataaaaattagctaataatttctcactatctttaatagtatctggtacttgaatatatttatatagatcataatttcttgttttaatgtaatcactaaatgtttcactatcaccataaatagaattgctgattttagtcctcatttcaatatcccatatctcttgaagttttctatagatatgatagttgtcagtttctataatcatatcttctagatattttcgcattttctcatttgtattaaaaacctctaagaaatcttcgatagaatatttttctttctcaaaacctgtcattttaaaattctcagtaaattcaataatttctttataattattgattctagaaacatttttaatagctatctctttaatttcactcattatactactaatatctatactattttctatgtcccgatagccataaatataattaataacatctggattcttacttatagtatccctataaccatgacttctaataactaaagattgcagagctactatagcatcatatatcttgactatattttcagaaatacttccattaataaatccaaagtcaataccttctttttgactataatctaattgaaacttatttaatattgacatgaaataagctaacccaattgtttcattcatagcatctattgtagtatcaacactcatatattttgaattaataaaattaaaaggaatactctttacttcatcttctgatgcttgccaataaggatcatttgaaacaattgaattataatctagaataatatcttttttaaaatcaacttctttatcagcaggtgttttaaaaaacattagataaggatcattatagtttaatttcccagttcttggatctgtactataaccttttgccaatacatatctatatatctctatattatcaaaaccaaataaattgataatttcaagaatagcctgattagttcctttatgagataataatgtattaatcatttttaataatcttctttgataattaattggcatatcctcaaaataatcaagaccaactgaaataaatgcatttttaagagtcctcatatcataaacatctatattaaagaaattttccatctttctagttagatatctctggacggtagagaatattaagaacaatttaataaatcctctatacatatcttggtttttaaatgccttagtagaggtaactttattatgataatttagtacttcatagtagcactcataaaatagattcatttcttctcttgataaagtaggtcttgtggctaataaaatatgaagatctttggcagttctagaagttaaatagtctattccccagttatcatacaattctttatagtaactatttaactcagtataaccatcaattatttttttcttagtttcttcatctacatcatataaacctaaacgtatatttatgaattcattagacaaacgataagaatttgtagtttccaaggaatcagctaattcagtatcttttagaatgagaccattggcgaactcaaggacgctttcaatctcatttatatccccttgtgagaggacactataattgcttcccaatcgtgttcacctcgcttattatttatctttatgttcagaaatggaggaaatgtgaaaatgataaaaaaaattaatagtcctgctaaagtcaataatattgtaaatattcaaagcgttcagaataacgataatattttattaaagaatatggatggctacttccaagagaaattttattatactgatatttatgatgatactaaaatgaaaaaactagttggatcaattaagagtcaaattagatcaagtgatgagtattctcactatattggctttcttaaaaacgaattaggattatctcattgtgctgttttaggaaatgtatcagcagaagatgcgtcattagagtttcaccattatccttttactatacatgacataattaatctgtcaattagtagacatattcttctaggaaaaaaatttaattcttttactattattaaagaagtattagatgatcattataataatataataggtttagtaccattatcattaactgttcatgaattagtacatgctggtgaaatatttgttaatttgaaccaagtttatggtgatataaatgaatttaataaaaaatactcgtttgctatgactgatgatatgattgaaaaatttaataaattaatagaactaagcgagagtaatgcaccatatagtgaaaataatattcttaaaaaaatatatgataataatgaagataacgatagaacttaatctatcgttatcttcattatctattaactaatgaaagttttccattcatttcctttatcatctagaattttactttctgtcgttccactatcatacattgaccaatcgtgaaacctttcagctgattcatgagaatctttatcacataatgcttcataatataaagttttatcatcatcatatacacgtactctttctacgtttttacctttataatcatctgtgactttttccaaaacatctgattctctatttcttttttctgatagaaagtctcttactactttaaatcccattttaaatcatctccataataatattattactttaattttccgaatattaagaatctctatttatctaaatattgtccagcaatacgtcctccttcctttaaaatacgtttcagcaatcttcttatatgtccagtctgggagttctttaataagcttttctaatttttcaatatcctggatttttacttttgtaatttatattttttactttaatataataatggactcctgctttggtaacatttagttccttggcaagtttatcaagagtccagtctggatgttctttaataagtttctttaatctttcaatatcaattgctggatttttacttttgtaatttatattttttgttttaatataataatggactgctgctgtagtgacatttagttccttggcaagtttatcaagagtccagtctgggtgttctttaataagcttttttaatttttcaccgtcaattttcatttactttctccttagcaagtgttttaagtttcaatagacatttttctttccttctttgctcttttaacatttcatcaataactcgtttttcacgttcaagataaatttcataatactcattaattaaatcaaaactaaaattaacttgtggataatattgtttcatttctctttcaaagattacagctggaaccgtagtatttctaaatccttcaagggctttcccaatcgcctttaatctattacaatcaccatctactctctcaaaattaacataatccatttcttgtccaaactcttctgctaaattactagtaaaaccaataagtatctcaatatccctttttaattctcgaatatcaatataatatgaattatttttttcttgatcccccaattgataattactacctttatgtctcaatgtcctattagtatcatcaataacaatgggtctcaatttaccaaatatatttgcatcatttaactcctttactaaattctctaatgcttctaatgtaatatcttttcccaagtgaaaaacctccataataataaaactttatcattaatataatatatatttaaaatttatatttacatttactatgaacaatagaatagagacatattgagatatggaggttgaattaattggaaaaagtacaaaaaccaatatctatttcagataaagataaagactttttattttctctttctgaggaagatattacattagaaatgctagaaaaacttttcgctaataaaaagaatacaaaagctatgttcaagccaaatgatatatttgtattaccaaagggtagattatacaatgataagagtatgacaacaactgttggaagatatatctttaatttattcatgttatctcctaaaattattcaattagtaggatatcaaaatatttcatttgatgatggtaatattggtggattggaaaatactctttctgaatatttgattgaagataaaattacagtgcaagaatttgcagattatattgacaaattacaatggcttggatttattactgcaaaattcttaaatgcgtcactaacttatgatctattagagatacctaaagaaacggatgctttgaaaaagaaattaattcaagagcataaaaaagcattggaatctggtgatttaattgctattaataaaattgaaaaacagttagtagctgatgcaaaaggaagagtatctgatattcctgactatcaaatttatgctagtggtgctcgtggaagttttggtaacaactataagaatactacattacttcgtggagctattaaaaatttagcaaatcctgatcaagttcatatttcagatgcgtcattaatggaaggaataccaccagaagaaattcaatactattcagatattatcacccaagcatcatacagtcgtgctgttggtactagggaaggtggatatgaatccaagaagcttagtgctgctttccaaaacattgttttagatgatgaaggttctgattgtcatactaaaaagactgtaacagttgaacttaataagggtaatgcaaatatgtttatgtatagatatattgtagaaaataataaactagtattattaacttcggataatatcaataattatattggtaaaatagttaaagtcagaagtcctctatactgcttaagtaaacaatactgtagtaaatgtgctggcgaactctactatcgtttaggtattaggaacgttggaattatttccaaccgtattgggacttctttacttaattcttcattaaaggcgtttcatgacatgactttaaaagttgtaaatcttgatatagacaaatatattgagtgatttttagaaataaattaaaaaaatacacaggttcctaacattagattattaactaatgttaggagcttattaatgccaagaaaaaataaatatattcccaaatccaatgataagattaataaatacaattacaatgacttattaaaattagaaactgatggaaaatatgaatttcttgaaaattatattaaatcaacaacaccaatagaatgtaaacatttagattgtggaaatatctggagagtagcaccttatgaaataattaaaagaggatcaagatgtcctttatgcgctaataaaattagggcagaaaaagagaagtcaaatattgacgaattgaataatttgctttttgaatcatatggttattatccatataattttataggagaatatattaaccattcaacacctataagagtaaaatgtaatatatgtaataatgaaagcaatatcacacctggaaatataaaaaataatattagattaaaaagaaaaccattatgtaaacagtgtaatattaatagaatgaaagataataaagctagtaatgaagaatatgaaataaaattattgaaattatttaataaaaaggaatatgagatattagaagattataaaggggtaaaagaatcaataaagcataaatgtattgattgtgatttagaatttaatgttaaaccacaaaatattatttatgctaaaacaaaacacaatagaaaatattgccctagatgcaataatatggaaagagatattagaagttatgaagaaagattaaaagattctaatccaaatattatagcattagaagagtttaaaggtagacgtaccccaattatgcataaatgtttaaaatgtaaaaatcaatggttaagcgcacctaataatagactcaatggagaaggatgcccaaaatgttctaatatattcacacaatccaaaggagaaaaagaaattatagattttattacagagaattataaaggtgaaataattcttagaaatagatcaatattaaatggcaaagagttagatatttatttaccagaattgaaaatagccattgaatatgatggtttatattggcacaatgaaaaacataaaggaaagaattatcatatcgataagactagaaaatgcaaagaacatggagtaagacttattcatgtatttgaagatgaatgggttaacaaaaatgagttagttaaattcaaacttcttcatattcttggaataaataatcaagaaaaaatatatgcaagaaaatgttatattgaggaaattgatagttctcttaaaaatgaattcttagaacggaatcatatccaaggaaaagataatgctagtattaaattaggattatggcttccaaaagaagatggtgatgaattaattgctattatgacatttgttaaaagaagattagcactaggttcaaaacataaaggagaatttgattatgaacttagtagatttgcaactgatagggactatcgtgctataggtgcatttggaaagttatttaaatattttattgaaaattatgaacatgatagtattataacatatgctgatattagatggtctgaaggaaatgtatacatcaaaaataattttgaatatacacatgatagtagaccaaattactggtatgtggatagaaatgatggtactaaacgaattcatagatttaattttagaaaacaagaactcaaaaataaatttcctgagatatatgatagcggtttaacggagtttgaaataatggataatacaaatttttacagaatatgggattgtggtaatatggtatttaaatatgaaaaaaaaaataaaggttgattaatttcaacctttatttttttttagtcatacaatccctcattaacaatctctaacatttcatattttgtaagtggtcttcctaatccattaatattaggtatcttgtaattcttttcccaacccttaaatctagctcttattctagcaatgaattgtattttctttttagtcttttctgaaccatctttaatcatcaattcagcaatcatgaaatccatatcaataatagattttgcacgcaacaattttaatatgtctaatgtcttagttgtcataacttctcctaattaatttaagaattttatttctctaatataatcttcctcatcataagatacattaattttgtcgcccttcttgagtgatttaaaaacctcttcacttcctgcatataattctctattatttcctgaatcagataaaataatcttaaatgtatctcttgaattttttccttttctttctatttttaccttatcaattattgttgaattatctatagttgaatattctttatatgtgttagttgatggttttttattatctatagtagtattggtgcttacttgattgcatcctactaataaggctgataataatcctacaataactaattttttcaaaagaattacctcacaatcatcaagtatctcttatttattttctgacttacttaactcatacatctcatcaagtaagttcatagaataatcaaacatttcactatatatactatagtttatttcccctgttgagtttaaaccatttagaaaatcagccatttcagattttagtttttctttttttgttgcattaggtgatatcccccacgccatttatttcacctcttaaattttatttggattccatcttaaataattatcttctataacttcagctctacttttttcgtagcttcttattaattctgtcactgcatgaatcaaatgattattgtctgttaaacaataatctcctatttcatagtatttatttgtctctttacttactaaaaccttatattttctaaatatcttaccttctacttttttgtataaagtgatcctccatttaaattgatctcctaatgttttcctaactacgttaacataataagtacctttatctgttttaatttcctttaaatcctttttattaatcaattttaccatcccacttattgtaattttcttttatctttttaactttggtactacttttttcctttttgaattctatagattcaatatgttcaatttcatcttttataaattcaataagcatgttgtctggctctaaacttggtgtgaaccaatctgtttcaacttctctaatatgcttaagattgtatccaaaccaccattttcttttatttgcagtatataaattgactaaccatttatgctgaagttcattaaatggaggagaatatcttgatgtttttgttactataacaccatattttcttagttttgattcaactattttaatatccatttttaatctcctttaaaaatataaaggataattaaattatcctttatattttcttctctttagttatttagaataaagattcccaaaatctgatctttctgtagatcaaaatctccattaaaccgcccgttatttctgtctactaagaaattctgtggtgataataatgagaaatgttctttcatcttattatcaaatactggaatgatattcagtacgtccattcagtttatataagagcgcaacctctcataccattgagctaacatttctgttagaatcagactatatcttaactattaattctattaccaaattaatagttcctcccttttccatttaaagctttcgctacctcattagcttaggctgtactctactcacttccagataccgtatttctcgaatatccgtgttttcgatagtcgttgaaccttactatacattgctccacttaaatgtatttaaaacctgtatagtcttggctgctggttggcatatcttaaatgacttagcttcccagacaattaaagaggtttaaagacggcaatcgccttaccgtcatagtcacccgataatgcagataataagttattgctgatcccaagtgttaagtctttataatcttttttaataagaccaatttttaggtataaaatactaccaatactaatagtagggttacggttaagtaaaaatgtacaaccgcctttagtttttgtaattagttcttccatatagttatataactcttgattaaatcctagtatgcctttttcccaaaattttagtgcttcattataatttataccttttactttactgataagattgataagctgaaacttataaagttctgcaaatgttttataaggcatagcaacttcatcaataggatgaccaattaatggtgtaataacatttctagcactaaagttgattctagaacccataatattctttcttagaaatccttttttacctcgaaggtattcactaataattcttgttaggatattattggcatagaattgcatattataaagtaatggtaataatagtaaatcaatgctgtcatcagatactacaccctcattaatctggtttatgtactcaataacaaagttgtagtaattattaatctcatcaaatgctaatacttttcctttactccctgttaataatgtggctggtctaagtttgtgtgaaaatactggtagtttattaataaaaatcttatcatgattttcaattaagaaatcatattctttttgatatttctttttatcagtgtatttttcaaggagatcatcaaaattatccttaaactttactaacccgatataatcatcttccccaatttcttctgttagatcaatattctcaccgttttgatcaatagactgttggtagttaataattttattaatacttggaatacattttttgatgatagtaaataagattgggttgataatataataaggttcaatattaatccatccaatagtatctatatccttatcatcatcgtcttcattataactaccaaatatcctttctgagtaaataccgtcatcagagaattcatgattttcaattggattagctcttgtaattaaattctcttcattgtaaatctcattaaaatcgattaaggatagtttcttccccatattctgttttccccctattttatctttctaatacacttgaaaattttcttttttgtaaatctaaaatacactatctctattataactgttttctattctctgcgcaagtaaaattttttaaattttgtcaacaatcttctctccttcctaaaactataatcataaaaataatatatatttaattttataatagaataagcaaagactttcttatagtctttgcttatttaaataattgcttcgctgtagaatcatttataatcccatcagctttcattcccttagatgattgaaatttaataactgcttgcatagtagtctcatcaaaccatccggtaggttctaatatatagcctaagtcatttaaacgttgctgtactaaacgaacatcatcaccaaataacataggtgtagtatacataagtgtcctttttataaaagtaaaacttgtgtcagtaatttgactccatgtaattggtccaacttttccatctacagttaatgaatgtgattcctgaaaatttttaaccgcagattcagtactactatcataaaaaccattagagttacattcataacctaaaagctgtaatctattctgtaatcgcttaatatcatttccatataactgattattgttatcaaagtataatattctagaaaaggtcattctattttcaaaaaattttaatgataatttctttataagactaaaagtctcgtcattaactattccatctggaattaagttatagcttttttggaaattaagtactgctaacatggtagtattgtcaaaatatccattagtatcacagttgaatccaaatagatttaacattgtttgtaattctgttacatcattaccagtgacaggtttttttgaatcaaagtatagtgttctgttaccaaatgcatatctcaataacccattaggtgcttttcttacaggctcaattgacacattaagtacattggctataatctcattcaatggaaagaatattcccggattgcttttatcagtaagaatctcatctaaagcgtatatagtctttaaagtagaattattatttcttaagtattgtatgagtaaaacaattgaattcttttgtatagttggcattaattcggatgtataatcaccttctacgcaaattccaatactatttctattgaagtccattcctgtttgatcatcatgagcaaattcgccaattgtatccaaagatcttcctctaaaaataacaccttcttttgagataaaaaaatgacctctaaacatagtctttccattctcatatttatcttctctatctaaatcataaatggaacaacctgatctttcagaactaaaaagaatgaggaacagtggtctgttcccctttcttggttctccattaggagttagatatgtctctatgatatttaatgacatattatcctaaccttcctttttgtaggtattataaagagatgttataatattaaattcattatcaacataagctaaatcacctatatcatctattgcttttttagcatcaacttcataatcatccatccaaccaacttgaaggtcattagctttttctaaattaagaattattttcttaattctttcaattttctttgcagtacctttatctagttggtcaagatattttatttttaaaagtatctttttaccaaactcataggttttattttgagcctcaactgcatcctcaaaatccccttttaagaatgtttcaatatcttctaataagttaagaataacatctgtttgttcatcaacgtcatgttttaattcattaatatcttcaagtttgtcttctatttctttagttttactaacaattataccattcttattggcagatatatgaccatcaaatcgattcattatcaactgtccgggctgagagtcttttgcaaattcttcagaaagaggttgatatgcgaatcttccattataagccatcaatatccacctccaatttgatctaaaccagatttgttacttattttttgattagttatatcattagccaagaatttcatttcatctatagttgcttttagtttaagaatatctttcagattatcaactataggatcaagaaaaggacgaatttctttatattgaaaatccttcaattctttacaaaaattatctattagtgtcattaaactctcaacatctgcatccaattctgttaagctgacatataattcttctgccctatctctaacctttttagtatcatcttttaatacatctatagagtttagtaatctttcaatttcttcagctaattcaataaactttttaacaagcttatttttataactgaggagggcatttgccctagcctcaagttcttttgttttacttttatacttaccattatgcttaattgttacatgcccagtcttcttatcaaggatgatttctccttctttagcattaaacatatttttctcaagcaatggtcttattacaattctccaatccattgattatcacccaatcaagtgttatttttataccaaattgtctcaccaataaggcttgagttgttctgaagaccatccattatttgaagagctaattctgtctttccagtggtagtatttctaagttcttcaattctaactcgtataccactagtaacagtaccgatttcttctaatgaatttttaaattgatcgataacgcttaaatcagtaaagtctaaataagataagatggatttaattgtatttacatcattttcaatttcataatttcttttttgtagatcagttactttttcccttaatacatctttcataattttaaggtcattgattctctgttcattattttgcagagagatatcaattgcaactgctcttttttctgacaatgctagtaattcctctaattccttagttttactaattagatatccatcatcataaattgaaatatgtcctgtatcacgatcaactaccatctcaccatcaattgcctttactttgttttgttcagttaatggttctaagctgattcttagcggtccaattggttctggtatcttatcaataattgtaaataccacatatgaagtggctcttagaccattaatcttcttaattgctattactgataattgataactattaggatcatttaacagagtacctagtttaaatgttctaccgttaagtttagcttcaaattcattatcttctttataagatggattatcttcataagaatcaatatctggtcttgctgattcctgaataacttcaggtaatacgccaacaatttttggaggctcaggaggaactgaatctaatgtaaatttaactatagttgtagcagttaaaccattaagacgttttttagcagtaacaactaaagtataatctcttatctcagctacttcattatatattggacttccaatttcatatggttctccatttaaggttgcagtaaaatcaacaccataaacatactggacagttggtgaaactgttaaatatgttgatacaccttctttaaagcccataacaacaggtgggtctggtggtaatttatcaatatttgttattgctttagtgtcttcaacaaaataaccattaggatctttgtatctagcatgaataatacagttatcagttacatcaaacggttcattatatgatttccattcttcagcactatcaattttatattcaaattctgaaccgtaatttggatatctaattgtaatagtatctttaatgcttggtatatactctggatctgctagtattaatggcttttgttcttcatcaggattaaatacgataaaattaacatcagacattgaaaccataaaattagatttctttctccgaacaacaagtaaattataatctcctgagtctataataggtgttcccataatatacggaagaccatttaaatatgcatcctcattttcattaccatcaacatcaagatcatttgttaatgaaaatgtaagagatatttcaattttattttcaggatagtttggatcagtagccgttacaactaatctatatgcgcccttgtctctaattgtatcttcacgtttaaaagaacttagaagggttccatttaaatataatttgtgctcatactttaaccctgcaaaaatatcccaagtaggttgaactgccacatcttttcctctaaagacctgcccttcttcaataatagaacctgttaatttattcttaataataagttctttcccagttatatcaatagatccaggcattaatttaaaatttctaactaccattttataatttgtcgggaagttatgatctgaaattttaacttctactacataatctccatattcaattaaaatatcttcatcatccgttggatcatatgtccttctagtaccattataagtaatccatgactcataatctagattagatggaagctgtcctgtataccaaaatggtttaacttgaatccctttatagacatcgttattttgaataggtatatctgtaatagcgttaacaattacaagagcaatttcattcatatcaacttttttatcaacaattgagaagtgtctcactacagttgtagtgttggtaggattatctatctctgtgataattagttctaactcatagtcacccttatttgataacactgtgagatctttcataaaatcaaaatcttctccatcatatcgcaatgtataatctacatcacaatcttctggctcatcccaagttggcaacactaattcatcttcaaagattcgtccttcattgatttcagtctcatcaaaatcattataaatttcaatatcaagattagtgttaattggagctataataaaattacgaataaaagtcttattctctccagcaccattttctaagacaacagtaatagaataattaccataatcagtataaacatcattatttggcgtaaaaggaactgtagattcatctcgctctaatgtataacttattatagtacaatccgctggaattggttgccaatatggtttaacttcttgatctttaaatattttcccttcagaaatgatagtgtttggtgattcaggaagatttacatcaataaattccatttcataagtatcaagatcagttatcttttctataacctcgaaatttacattaatttcctttttattatctggataattcttatcggtcagattaaatttaattgtatattgaccaatattagttaatgtatctccctttttatatgaaattaaactattattatacgtaacagttattccatatgttatattagaatcttctttccaagttggttgaactttagcctcaaattgagatccttcgctaataggtttagtagtaattgcatctctaagatctaagacaagatcattccagtcttcaggagcggcagtaacttcaaagtttataatacctgtagattggttgtctggataattcttatcagtaataagataactaacttgataaagaccagcttgactataggtattagatttaactagagatcctttaggagcactattaacattatagttaacagtaatatttgtaccatctatttcatcccaatatggttgaaatttaccaacaaatttagaaccttcaactatttgagaggatgttaatagatccttcagagtaaagttaatattatctaaatcttttttaggaggaagtacatagaatgtaaattcatttgaatctctagtattagtcggataagctttatcttttgctgtgataatagctgaatatttaccattttcagataaagattgaagcctactgtaaggtatttcaattccatttttttttaatttaatagtataggcaatagaactgtcatctgcattccaatctaatttaactgaatttgaaaatctattttcagtcgtaatattagtattagtatttttatcagtgagtgtaaattttataccacttaaatctttaggagatgaaccttcaaaagcaagaacataaactccatctgtatcttggtgagaaatagtagaattggaatccaagttaagtgctggagcaacaccaattgtatcgttatctgcaacagactgagcaaatgcgccatttatgttaatacgataaacaatatgaccaaaatcaggataagcagaacgtaaccagtaataatagtttgaactagaatttaatgatgaatgttgatatttactttgtgtaacggcttcatcagttggtttaagaatacgattagatgaagaatttaaatatggaattgttgttccttcttttccacttgatcctgctaatcccatttctgtcatactaaataggaatacattatcttgaacagtctctactccaccaccgtcaactgttggaacaattgttttcaaattagtttttaaaattctatttgcaaaatcactactaaaattagttaagaatccatcttctgtatcatagctatttccattagaaccagaagaaggaggtgtatcagaagaattagttgctgtaaaccaaggtgatggttttgttgaattcaaccattgacgcatattggaataaagccatctgttgtttcctgatgtttgcctatttgtattactattactaggttccttagcgtcaaatgtcttaatagagatgatattattagtcatcaaagtagcactatttgctggataacctgctaaatctttaccaaccaatttccaaacaattggttttccattatatttagtattaggatcctttactaaggatcctaatggtaagtctttaattatcataatttcactcccttattattaaccttcaatagttgggataactgttgatttagcatctccttcagatactcccccaataactggagtgtcaggtggtgtagtatcaataatatcaactattttggatgtaatatagctttcatagtcatcatcgccatctaaacttcgtacatagattatacaatttttatagattttaactggatctctgtaccaacgccaatcaccgtcatcaatccgatattgaaatttcattgtaggatctttcgggaaattaacagtagctatagttctataacataattcatttggatccaaagtgattgtatatctatattttattttcttatagaattctacagtcgtatattctgaatatagaccatttgaaagtttatgtgctttagattcaatacgatatataccttttttagagtatgtttgttcctctggtatttgcacccattgagtgtcatttaaatcttttttataataaacttttgttacaggtacacaaccagattgtacaattattcttggtgaaacagggttagggaatctacctatgagtccgtaatctttaccttgataatctttatcaattctaataattggtggatcaggtggatcattgtcaatagtaaatacaccttttttagtaagtgttttatggttagtattttttctaattgtaacaacaattgtataagtaccattttctactaatggagtacctagagtatatgctttaccattaatctttgcttcatataatgtgcaaccactaggaacattaatagttggataacacgccgctaaatatactttgttatattcatcatatattcttgatgtaacagctttatcaaaaattttaaaatcaggagcaggtgttggatcttcatatataattcttgaagttgcaaaatccattaatgatggtgtatctttattagtacatcttactgcaacttcataagtaccatacttattaattttataataattagtaaaagtaaagttactagtattaccatcaatatcagtgtatctttgagaagttatatcatatttaaatttagatgtatcttctttccaaaaaacagtaataggtttgtaaactttataagtttctggtgtattcggaatcaagatatttttattagatctcttgtcatacagatcaatattaggttttgttttatctgcaattgatctaatacctgtaacatttactgttgcagaactagggattttttctggtgattttaattttactttaaatttaattggtcttctataagtattatgaacagctagataccaagaacctttataccagccactccaatctccattactagtgctattagcccactgatatgttccaggaatagaaacccatttctttggtgtccattttttagataagtcagtagcatcaaataattgtgcattagtttgagacttaggagctgctttagatccttttgatattttggtataaggttttgtaccatagttcatgataccatcatacttattcccataccaataccatgctggattaatccattgctctttgtagtcatattttactgtagttagagtcactttcatatttttcttaattgtaacataactacttccaatagaggttctttttcctcctgcaagtgtatagtatttttcatttccctttggaactacacattgaacttttatatctccattggaaagaacttgttttacaattaaatagaaaccggatttagaacccttaattctatctccaactttataactagttttagccatttatttacctcctaacctataactattactttgtattgatttgatgatggtgcagataagaaatttattcttattgtgtttgcatcctcaatagaaacattagtcataactaaatcttttgtttcttcatcccatacacttacattaatgtcattagttcccaaattatgtcttataacaaagctatggttactactattaccaattagttctgaatattttaagactccaattaagctaccatcttcactttctcttatatcatttagctttctacgaacatccccatctaaatcactttcgggaatcccattaatgggtttagaatatttagaatcccaatctaatactttaatatcgtttaaatgacgtttactatcttctacatgattttttacatattcaatgtttgccttactctgaatatcttttattaaattagttaattgagacaactctattcctgaagaatttatgacagaaaggaggttaaataactgttccatattcttttccatatatgacaatctattatttaattctttataaatgtaaccattctgtacatcatttgattctatccgcatctcgttaggcataataactctcaccttctttaataattttctacttatctatatgttcttttcatcttaagaactagaaataataatgtaaatgaagatagacaaatagcctatcttcatttacatttattttattagcggatcactactttaccaataaaggcagtaggaaattgtacttcaatatcttttgttgtatcattgacacgaacaagagatggttgaacagtttcccagaattctgcattttgtgtataagccacaacggaatattcaaatggctctttagtgattccatgctcagtagcaagaattgaaacggtagtagcttcttcagttacagttttagtgtaaggcatagaaacactattaagtttgttttgcaattctactactaggtcagtcactggaataccttcagctggtttagcatacttagcagaccactcagttttctgttcattagttacgtgaacagtttcatcagcgatatgatttgcactattagtaagagcagtagatacagatgcttcaaggtcagtaacaggaattcctgtttctggtttagcatacttagcagaccactcagttttctgtgtcgctgttacatggatagtaccatcagcaacatggtcagcaaagccatctacagttgtaacaaaaccactttcgagatcagtcactggaataccttcagctggtttatcatatttagcattccatttagagcgttcagcatctgtaatgtgaacagtagtatcaccagtatgattagaaagatcagcaacagaagccgcaccatcaatcttacctttaagagcatcggacagatcagtttctggaataccagtattaggtttagcatacttagcgttccagctagctctttctgaagcggttacgtgtttaactgtatcagtagcatgagcattaaagtctgtgtttgataccataccatttactttagaaataaatgactgtgccatatcagactcaggaataccagttgatggtttagcatacttaccattccagatagtacgctcttcagctgtaatgtgaacagtagtattatctacgtgagtagttaaatctgccgctgaagctgaaccattaattttagcctctagttctgcttccaaatctgccgctggaattccctcttctggtttagcatacttaccattccaagcaattctttcgtcagcagtgatgtgtttaacagcatcagtagcatgtgcatttagatttgcctgtgttgccattccagctactttatcacggaaagcaagggtaagatcagtttcagggataccatcagttggtttgacatatttggcattccagttactacgctcaacagttgtaatatgtttaacagtatcattggcatgagccgcaagatcagcagaagtagccgcactattaattttagttttgagatctttttcaagatcttcttcaggaattcctgttaatggtttatcatacttagcattccatttatcacgttctgattgagctaagtgacgtacactatcagtttcgtgttctaagaaatttgcattagtaaccattccattaatctttgtctgtaagccagaagcaagatcagtttcagggataccagttgatggtttgtcatatttaacgttccatttagaacgttctgtttctgtaatatggattgtaccatcagccttgtggttattccaattttcacgttctttttcactaatatggacagtagtatttgaagcatgatcagtaagttctttcttagtagccgcactaccaattttactctgtacactagaatccaaatcagccattggaacaccagttgatggttttacatattttccattccaagaaagacgttcagcattagtaatgtgagcaactgaatcatttttgtgatcggttagagctgtagctgtagccgcaccattaattttatcttggacaggtaattctaaatctttcattggaacgccgttagctggtttatcatacttagcgttccatttatcacgttcttcacctgtgatatgtttaataacatcatcctcgtgatcttgaagatcaactgctttagccgcactattgatactattttgaacaatttcagagaaatcagtcattggaataccagtagcaggtttatcatacttagcattccatttagcacgctcagtagatgatgtatgaatatcaagattattagtatgattagaaagatcagaatttaaggcagatgctttaatacgatcagaaacaactggatctagatctttcattggaataccagtagcaggtttatcatacttattattccatgctccacgttcagttccagtaatatgtcgaactgaatcattgaagtgaggatcaaactcagtatgacgaacaatatctttatcaatgaattcagaataaatttttttatctgcattgaaaagatcagactttgcaatttttgcagataatagactatctacttctgatttaatataaaaacgagaagtatctagtgttaatttattaagatcttcaatgttttccaatttaattttaccagtaaagtgtccatcttcagtaataagagccttaataacaccttgagaaataaaagcagcaatattaccagtgcttgtattttccaatacagtgctaccaatatttttaagcatagagtcagtgtttctagcatgctttttctcaatagcatctttaagttcatcattcatagtgactccaacactggattcataaattgggcgtcctgtttctgtgtagccaatagggtcagtattagcattaccagaagaatagttagtaccattcaaggtaattttggagacagaactaaagcgattatcagccattaattggtcgataattgtcttactcaagctatttgagcttaatgtgtttgtatagaaagaactcaaatcataagccattagagtctacacatccttttctgttattttaatcctttgtaatttaccttatcatacggttcattacaatcgattaatatattgttatttaagtaaggcaacactagtgataaattttcgttcaaataagttaaaaactcaatactaccaatttcattgcagtcaaaatcacaatctttatcctgtataaattgtctatctacttttgtattaataagataagacctgccaggattaaataaggaaatattatcctcaaatctccgttcattataggatctgttacagttaacacttatatcatgattgaaataggtaggtaattttttcatataatccataactactggactttcttttaaaccagtaaaaagattattgttatttgaatctaattcgggagcaatattatttttaatcatattaaatagttgctcaaaatattgatatttatctttcaattgataaatgtatttaagtccaatatatttatcttgatcagtttcttctatagcttcacttgaatgagtttttaaccattcttcaatgaattgatcttgaccgattctctttgacttgatatcatcttttgaaggatattttttatagagttctattagtcttataagaagatcatcttcttgataatgaaaagtaatcattatattttttctggttccaatattttttaaaataagtgatttagagtttatgatatcatattgtgtactatttaacttcttattgttggcataaatagtaaaagttccatctattaaaggataagaatcatcttgtagagttattattgccctgttatcctctctctttggaacttcactaaagaaaaagtatgaatttttcatataatctctaaaagttaattcaattttagaaccaaaatgagtcatatctttaaaaagaatcatacttggaatttgattatgaagttgcatattaattaatgcaaaatcatcattgggagttaaccgatatccattaacaaatacctctacattttctatatcttccataaattctgtaactacttcaccattacttgtcacatgagaaacaggaacaaaataacatggaacttgatagtaatttgccattaagttaaaagcatcagtcttaaagaacattgattcagtgatattattggaaactaccataatctcattcccaattttcggaatgtaattatcttttataattacctctagagaaaaacgatcttctgtaaagtaattaacaataattttagttcttttaggattaacacgtttccatgagttactatttttgaatcgaacataaactgaaaaatctctatgagagaaatattttccaattccatctgttttaacagtaattccctttgtatatagattctcaacatcttcttttgtttgaataatataagtacatttaatttcttcgtaatcaattaatgggtttctaaaagtttccaattctatagttgaatcatcttttatatcaccctcttttaaatacgaacggcttattccatctaacttattttgagaattattgtctcggtgaaatatctttttaccatcaacatacgcatttaatttatgtctatcagatataaaatgatttatatctttcatagtaaattgatacttttcaccatttaccccaaaattagcctcttcgctataagcatcaaacttattagttaatagatattttcccttagtaccagtagttaatttaaatactctattatttactggattacaaataagatttattaattttttaatataactaggatcaatataatttttatttgttaatttatccattaaaaatttattcatataacgaatatcgccattgatagttatttctcttagttctttataatctttatcaattttaaataatatcccatctctatttggaaaataactgtcccaagcttcatcaacacaccatactcttaaacgataaaaatattcatcattcttataagtgatagaaggtaaattatctgtaaatagtgtatctgtaatactgagagattttttaaatttttctcctctagtgattacatcgccgttattatctataatttctatttgcatgtagatctctagtttagaatagtttttaaaattccaagagaattgatttttttgcttatctaattctccaatatagaaaagagggatttcctcatctttctcagttgttgcaccattatcatctctcgcagttatagaaagggtcagatgggtactatcaaacccatctgtgttataactgagaagttcatcaatgtcaataggtgaatttaagaattcggattgaaatctaattgacataaatttatcactccttgatatcgtcccttattgtataataaaccttatttccatctttatcagttatagtagcttttatcgatacatcatagtggctacttccaattcttttaacattggttgaatctacatttattataggggcattattcttaatcatttcaaatggtaaaccatttatattaggatagaaggatgtccacgtttctgagggcgtagaaagtctaatcctaaagaaataattaccttcatcataatcatcaaatttgatactttctaagtattctctatattctctttgatttccaacacttatttcttttcctgcaccctctaaattaccttcatcatcaagtatttcaacctgcattataattggaatatttgtgaaatttctaaataaccaataaaaattatcataatctctatataaattttgaatatcaaaaagattgataatttcagttctagtatttaatgcatctccttcatctaatgcatccatataaactattaatctaggtgataataactgtgacacattgtaaccataatttatagaaaaatctaaaggtgttttttgaaaatcattatcaagtaatttattaccatattgatcttttgcagttaatttaacgagatcttcgtcaatatctgtaacagttccattaattgaaagaccaaatttattatcttcctctttttttagctctatcgaatgtacttcaatttctggtttattgttctttaatgctgaaaatgcatatcccttttcatttggataatacgtagtccagtcctcatgttcagaataaatctttaaccgataacgataggagccttcaggaagttttggataaagtcgttgttcaacaaatcttggtctcacagtacttccgatagtttgatagtcactctctctatagacgatataatcttcttcagttgtttcttcattttcttttaatatttcaatggaaaattttaaattttgaattgaataattatctacataccatgagaatatatgacctttatcttgttttaatccattaatttgaaatgcaggtgctaaaacagtttgaatattttctccattgttatcatcttgtatggctagagtaatattgacatgtgttctatctattatatcatatacggcttttatatctaaatcatatggtgtatcaataaaatctcttgcttttcgtataatattaccatcttcatcagatatggtgaataagaattggtcattctctggatcatctttaatatttgcttttagtaataaatattttatattatctaaatctcggtatatacggcattcattaatagtaactacagggtctttatgttttcttactgtaaattgaatgccatcttctaatcttttatcaaatggatagtattcttcccaatcttcttcatcacaccatacttttaagtggtatttatagtaatccctatcaagaatgaatttagtttcatcttctaagtcaatataattattactatttctatatctaataacctgaccagatttaataattttaccgtcaaaatcagttacttctacttgcattgctatactcttgtttgagtaatttcgaaatttccatttaaacatatttctttcacgataaaaatcatatagatcataaagcttaatagtatcttgttgttgacttttaccgtataatttatcatttacatcaactgttagagtgagtttacttacattaaaataactaaatggatattcataatagagatgctctaattttgggctataagtatagcttcttagattaacaatagaactcccaatattatcagttatcgtatagattatatcatcttcttcatcatcactaatcaatattcttgatgataaagcaaaatgatcagtttctcttcttatcttggtatcctttatcctcaaccgaggattagtattatctcttaatgttaatttaagaccagattcactaggataaaacctattccaattttcttctttactataatattttactctatagtaatattcaccttcggatgtattcaaaagatcattacatacatacttatatagcgtataatcaataccataaatttttttatactcattactattataaattatttcaccttcattattcaatacttgaataattgaataaataggaaccgtagagaaattccttacactccattggaattcctctacagctgatcttgaaagattttctatattaaatgtatcaatttttttagatatagaggatgttgcaccactctcatcttccatatataaaataaattcagtttcagttccttgaaaataatccttactaatataaaaaaatttagagatattgattggagtagctacaaagttatctattccatctagcacatttcctttttcatctaaaatcttaaatttaacaggatagccagaatcattgataatttcagcaataatttgaacactcattgaatctaaagaacttttatttaatgaaatactctttagagtagcattcaacattccaaatcacctctctttattttagtagtttactaaattctgtataaatgctattaataaattttccagcaacactttcaataatataatctttagagatattaccatttactacagctccaaaaatagttgaaaggaaagaaggaagatagtccaagcctaataatgtagtctcaccatacattcttgcccagttctctacaaaacttctaacatttaaatctttcattcctttgatatctcttaaattatcaaataatttaaaaatatcttcatatgcattattatcaaaacgcatttcttcctctttaataagtttaagggatgacttattaaaacaagcatgataagcaatattatctacagtatcattattagtttttccacataaattaataaggaagaatttagctaaaaagaagttaatgagatctaatttatagtcatcaatattaatagcaaataatttatccattactttaccaactagttttgaatagacaattgctccatttttaaggattgtcatattgttagtaaaacgattccagttattgactaattctaacaatattgttccattctgcataaggttaaagagtgtttttggatagatatcatacattcctgttgttttatttacagttgaataatatccaatgtcaactaaagcaacaatttttccaccttcaactttaccaaaggtacttagatattttggtaatttaatagttggattattgataagaatgatatcccccttatttacatattgcatagtctttcctttagttggaaaagtaattcttcgactaataatatttaatgattcatctaatttagttatatccactctatctctagacacatgaatatttttaatactttttacaacactttcattggcaactacttgtctaaatagcgcactatcagtaatttttttcatattaatcctcctaaattaagtatcttatttatttgttcaggattaccataatatattcatgttatgataataatgatgaaagtaacccttttttagtttcagtagtataaatatttgtatttattttttcactactattacttacaccattgttattacttacatatcttatgaaaacatggtatgtaacgcatccagctcgtaataatactgaatccaaataacgatatttagaaacatcaatattaatattttcctcatcgctatataattttacttctatttcctctaatttatcctcattgggattaactaatgtaaataaggctatattatcctgttgactctttacagatactatatcacagttttttggcatcaatactatttgttcactttgaagatatattggaaatcgtctaatttgctttgtagacataataaaacaccatcctattctatatctatagctatttgttttggaaaaaatagaaaaaaaaaataagggctattaagcccctttattcatagttaaaccagtaattgcatctggtttaactatgaattttctacctttcttatcacataaagcaataagatttccataaatatccataatttctgcgtcaacatattcttgatgaaatcctttaattacatggattaccacccactgtccaattttataattattcataattcagcaccatcctaatttttattttttactattcgtattcgattgaaattttaaataccttaatcatttagtaatgtcctcctaaagattaacttatttcatctattatatccctcgtcttaaatacagatttttcaatggcaattaaatcatttatatatctatttggtaatagttttgatgaaattattttatatagctttctggcatcagctatacctataagttcattgtaatcctgtattttagaatatatacctaagttaaaacttttcataagactcttaccttctactggtatataaatctttctattttctttattgttttcatactcaattaatacgttatctgatgaatttatacacattgaaataatggtattacgtctaagattactaatattcttttgtatggtatcatcagtaacaagtatcacttttcttattccatttctttcagtcaacatatatggaatatgactcaacatagaattaagcctgtgactgaaggatacctttttcatcattggtaagtaaatcctccactacatcctttatagttgtatagaatagatttcttccttttggtaatagcaatttactgtcaattatagtattttcatgatttaaatcaatagttaaagcctctctgtaatcaagaggcttttcaattattgtggtataacatgcaagatctaaataatccgcattacagacttttattggcatatataaactaatattattaactgaatatctaatcattaaattactggatgtctttacaagcctgtaagaaggaagatttaaaatcaatacatcttttaggtcttcccagttatttcttaatccaagaataaactggtcattgaacagttgaacaagtatattcatcttaaatttccttttcctttctttagatttttattctaaatgttgaaaatacttttttactatggtatttgcaaatgactcagattttctctttaacattattatttctcctcacgacataaatgtatttacaataaattctcttaaactgtcatcctttttatgtgtctgccttttgatataagatacaatataatctaaggcttctgttgcagtaatttcttttataactccacctgtatttaaacagaaagaattttcttcaattctaagactagatttaggaattaactcatctcctctgtgaacaacttctactataatttcttctcctttttgaagggattcaataatagaggttacatcatgaatctttttaaatttcttccagaatcgtctacgttcaattttgataatttcttttcttactcttttgaagaagtcagatttggaaataacgatgagggttttaccaaatatgtcctctagatctttattactaacactcttttgatttaatcctagagcttggtaaaacttactttcggggagagacattggtttaccattttttaacgttgtaatagaaaatgtattttcttctcctttgttgttaattacataataagcatctctaaatttttctttgctaattagatcaaagaatgcaagactcttttcacgatacttttgatcaaaaacattttcattaacgttaattaccttcaccttttcaacaatcctttcagttttcaaaatgaaggagataaagaatatctccttcatcctccctatttatattaatattacttttcagatttttccttttcttttttcttattcttactttcagtcttttctttctttgtagcgtttgttttctttactggtttttttgtagtttccttatctttacttgcaatttcttcataaaatggttttttattttctttactagatgcaatttcttttgctttatcggcattagacttcttgtcagattttttatcttcttttaatgcctctaaagtttcttcagctttttcaagtaattcttccgtctctccaacttcttcatcaaagaaactattcatttcttcttcactaacttcaatgtcttcctcatcttcaatttcaatattagattgaaagttaatttcctcatcttcatttattttaacagtatcacgaaccaatgtctctctatgtggatcaatagcttctctcataccaacattttgggaagaatatatgccattatccttttcaaatctttctgtttctggtaaatgtactttcatttcagattcagtatattcttcattactgcttttattaaacttatctttaacaaatcctactggatttactttcttaatattacccattttcacataattactcggagacaatttagtttttacactttcaggtaatttttcagagagtttcttaccaataatagcacttgcaattcccccaccaacaatagccgctccataagtaatagccttcttagttccttctttaactgcgttttctacgattaatctcattttattctcctccaaattttctttttttatttttattttaaatattcatcaatatcatgtgtttcaacattctcaaaataccattcatctttgtctggatcgtatctagcatcaatactatacattatcgttgctatttttctaggttctcttactttgaacattcctaatactctaaacatattttctttaagttctttgacttcaacattttctttattaaattctaaaaggtcatctccataatattctgtaataaatgattctacctgcttatgtgcttcttcctcatttggtttcccacaagctgaaagtaaaaagagtaaattaattgtgataaataatactataattttattagtcattatttatcacctttatattgcctttaattttacatccatatcatcaaaatatattgtagacgatactttagtgtttacccattcaatatatggtcttccttgatcatcaaaaccatacgatttaacaactacatcttcattgtaatcatttgtatacttaataagacgctgaatggcattttcaatttctttctttttaatgtcatcaagtacatttagatttggtactttctctttaaccaagatattaagagactttattaattgattaattttttcttttggtattccatagtcataatttgataagatttccataaaggaatcaaaaacctcactttctctataaatcttcataaagtcagataaatatttattaataaattctaattcctcatgtgtaatctcttctaaagaatcaatatttcctagttttataatcatattagtatttttatcatcttgtaacaaattatcaagatgattaccaatcttagatgaaaatacacttacaacatgattttcttctagttcgtcattagcatatgctaaaatatccataaaaatattcattatttattcccccaaatgtcctttttatttttcttaactacactaacctcaatattattgtgattctttttaatcattttactagaagtttcatttctccctacaactttatttacacgtttattgaaaagattacctgctgttctaccaagcttacgagcaaaagtaactttttctccattaaaattttccataatgttcctccactttttatttgaagtttcttattgttcttccaattctcattggatctaatacagcgggagaaattaataaatcaattgctatattttttgtaaatgaaatattataaccattataacctttttgaaaattcccttttaaaactttcttaccaaatttactttttgctgtttgttttctaataaagcaaataattggttgaattaagagatgaaagttaattaaagataataaaactagtaaaagaatattaataaaaatattcaattttgttactcttccttctttaactgttaaatattttaaatcattgattcccttttgtttatctcttctaacataattgctaactgttgatataattggtgttttattaatttctttcatttcttcattagtcattgtatctaaattttcttctacagtttcaaagaaaccttgaataaattcatttttaaaactttttctttcttttgcttctaatttaccaatctctaaaccaatataatattcagttgctatttctggtccaattccatactcaattatacttctaaaattataatgtaagataattcctttcttcccatgttgcatacctaactcaaatgtgtatgtaagtagtttatgaccaagttttgtacttttagttatcttcatcataatattaggtaaaatatggactgctaatccaattactaaaaattctatcatttttttgtttcctcctctcttttaacggatcatagaaatatcctattttagataatatagaattaaatattcattattatcacaattataatatatatttgattatattttttgatacggttaataatattattaattcatttttcaattatatattataaagatgtaagtaaatttctaaataggaggataattataatgtcagaaaaacagccagtaactattacttttactgaatttagtgaagaagattcaacaaaaacattactagtaggagtaacaagtgaaggaaaaagagaaagtgagatttttaatagtcttatttttcccacatttaacagaatgagagctgaaaagaaaattattaataaattaaaatttagaagaaagtttatgctataatataaatattaattctcattaaaataaaagaaatcaactaataaataattaagggtaaaaggagagatacttttattaaaaggaattatggagaggggaaagtctcttgaagaataatgaattatatggtttagaaatagcagatattcattttgggaaaaaagatgatgttaaattatatgaagaattaaaaaaatattttataggtaagataaataaagaaaaagaagacattgattatattattatagctggggatttatttgatagaattcttagaatgaatgaaataggaagtactttatgtatcaaatttattttagaattagttgatttatcattaaaatatgattttaaattaagattactaaaaggaactaagacacatgatttcaatcaattaagtaactttaaatacattgaagctaaacattatccaagattcagaattatagaaacagttgaagaggaagaaatttttccagatacattcttcttatatatgcctgaagaatacgtagagaaccaagaagaatactatgataaatattttaatctagaagaagatgctaaatatgatatgattttctttcatggtacatttgattttgtaggatttatcccagacatcgaatctgaaagacatgttaaaaatgcacctgtttatgattcagatagaattgcagatttagtatatgggaaagcaattggtggtcatattcatactcgtaatatatacaaaaataaaattgaatatactagttcatttagcagattctgctttggagaagaaaaaccaaaaggatttgtagagatattttataatcaagaaacattagagtgtagaaccaaatttattgagaatgaagatgctcctacatacgtcacatttaatatggatgacattaagggagataatttagaagataaattaaaaattattggggaactaaagaaagagtatgaccatgttagaatcatagcaaaagacattaatgatgaagatgtatcagccatgaaaagtttagtaagtcaggatagtgatgttaagcttgatattaagagaaaagatattgaagataaagttgacgaagaatatatgtttattattaatagagaatatgatctaacaactactactcaaaaatatattcagttaaaatatggtgttaatctcactcttgatactatcaataaagccatcatggaggaaaaataatgaaaaaatctaaaatgaataaactgttaaatgaaattgaaaaagaaggattattgattaaaggttttcataatggaatcccaagtgatattgctacaactacaaaacatgcagaaaaatttttagatgaatatctagatatgcaaaaatatattctaatgagtgtccctcactcattagaacttattgagagtttagattataatattgtatttactgctattgaaagcgttgcttttaaaatggatattgatatgcaaagaaaaattcataagtatgcatttcaaatattagtaagtgatggggatgttgacgctaaatattttattaaggaagttaaaaaatggaatattcctagacatattaaaacagaattatttagtgaaattgatgactggaaaataagtattattaatgagcttaaaaatattataaaaacgctcaatacttttaaaaatgaaatattagagagagaaaaaatctatggaaattaataaggaaaaaactgtttgttttactgctcatagaccacatctattgtatgggtataataaaaaaacctctggtaatcaaaagattatcagagttttatataatgaaattgttagacatattaaagaatatggaatagatacctttatatcaggaatggctctaggtggggatacttgggcggcagagatagttttaaaacttaaaagtgaatatccgaatataaaactagtatgtgcaattccttgttttcgtcaggaaataaaatggaaagaatatgatcgaatgttttatcatgctatattagatagaagtgattatgttcactatgtgtctaaaaaggaatatactaaaaaatgcatgtggaatagagataaatggatggttaataattctaaatatgtaatagcagtatataatggcgaaccttggactggaactggacttacatataattatgctgttaaaaagaatagaattattactagaatagatccttataaactaggaggtttctttaatggatacaaaaattattgataaaattaaaaaagcgcttgcattagccaatgatgctccaaatgacgaagaagcacaagccgcaatgcttgcagtacaaagattaatggtaaaacataatatttccatgaaagatgtagaattaaaagataattctgagaagaaagtagtacaagatgataaagtgattgaacctacaggtagaatttcttggtggaaaaaacaattatctgctattatagctaagaattttaagtgtgaagcattgatatcaaaatatgcaaaaaataaatcatctataacatttctaggtttagaggaagatgttattatcgctaaaagtgtatttcaatatgcagaaaaagttattgataaatttgctaaaagttatgttggaaaagtatataggtcaggtaaaagcactgtaggtgttagaaatatatttatcaatggtttcttagtaggtttaaatgaaaaattcgaagaacaaaagaatgaaaataattggggattagttctagtaaaagattctctagtagttcaaacacttgagaagatgaatttaaggaaacattcaagttctggtattaaacctaagtttgctaatgatagcgaagcatgggaagctggaaataaaaaaggtaagagttttgcagatacacaaaaaagaaaaggaattgagagtaatgagtaaagaggaaatacttcaacttgtagctagagatacattagatatctataagggtaataatcctaattatgctttgaagatagttactaagaatgttgtaactcatattctattaattaataaagaaacagcagaaatatatagagaattcttaacgaattcaggaatgatcacatcacttattgatcttagtgaatataattgggaagataatccgaataattatactatgagtcaaccaatacaattaaataatttaggttaatattcctatcaaattttattatcagaaataaaaaagagaaaataacaacagatgaacatacaagtgtataacaccgagcgtagaggagaatggtaggatgtatatcaagaagaaaaatggtaaaaagaaagatatagaagttgttgaacttcctattaatatagagatgtttgattctattattcaatatacattgtctgataatccattaattactaagaaatctcttatcaatttaagaaaattaattaattttattgatatcagatcctatagtgaagatttttcaagaatgttaagaatagaattacttaagaagattttagaaggggaattggatcaaaatatttatagagatgcacttcttaaagaatattgcataaaagaattacctcattactcaaaggatttacttgaattatttgagtctggttattttgatgaacctctatctaatgatgatattacgtttattaataaatttgtagaagaaaatttaacgtatatccatctaagaagacattcacctgacttagaaatggctttacagcaattaagagctagtgattctagtaatcttcggtcaattaataatacattagagagaattgttggggaattaaataaagatattaaatctgccaaggctgttaatcaatatgccgcaatggattttaatattaacggaaatactgctgattcagtagtaagggcaactattgaggaatataagaaaccaaataaccatttaaaattaggtattaaaaatcttaataagatgcttgatggtggagttgagaatggtcgagtttatttaatctttggtctgcctaaagggttgatttgagccccttcatacagtaatgtatgtcgaaaacctctttaactgctggaagttccaatatgttaattggataatcagcatccaagactcttaatgagtaaggttcaacgactatccgaaagcaatcttaggattgtgagtagccttgaaataggcaataggagtacggctcaagtgattggagtgggtgagaatcccttaaatggaaatgggaggtatcctattaattaataggataatgatatagtctcgacttctacgtatatataaaggtagagcagttcataagagaacgcagtagatgtagcgaatctactggaagacaccgttaaatctggaactttattaaatatcgcaatatggatttgtaaatataatagagagattgttacaaaagataaaactaaaaaaccatgtgttttatatgtaacacaagaaaatagtattcgagaaactcttcaaagaatatttgttcatagcactggtagtaatattgagaactatactgaagaagaggctctgcgaattattagagaagaagtgatcggtatagacgaaaatggtgaagcacctattgatctctttattaaataccgtcctaataaatcaattagtacttctgatttagatactatgtgtgatgatttagaattagaaggatatgaagtagtttgtcttattcaagattatactaagcgtattagatcatcaagctataatccttctgatcttcgacttgaactcggttcggtggttgatgacttcacggttgcttagtagtattatcaacattgttttctcattaaataacgataggagtgttataaaatgggaaaaacaacaaagaaaactattgatagtgtaaaagaggaaataaaactactctctaatggggaatatgaggtagtatctgatgtttataaaaataatgaaggtgagttaattattcgccatcatatgaaagatgggacttttcatgactacaaaagtagtagaaaagcatttgtcaatagaaataatagatgtccacaatgtaatacaaaaagattgaaaacaattaatcctaattttaaatcctttgatttaataaaagaagaatttaaaaatatagtaggaaatgaatatgaaatcttaacagaatcatctgaatataggaataataaacaaaaattattaattcgtcattttataaatgattcatttcatgattttgaaatgcgttataatgatattacaaatggtcatcgttgttcaatttgtagtggtcgtaagaaaaagacacaaaaagaatttgaacaagaagtggaaaagttaggcaaaggtgaatataaagttaatggaaagtataaaaataatcgcactcatattgaattaatccatctaaaatgtaataaaatatggaatgtaagaccagatgacttcacaaatggttttaatagatgtccatattgtactggaagtaatggtgagcagattattatgagatatttagaagagaaaaattataattatacttttcaatatatttatcaagattgtaaaaatattagaccattgccatttgactttaaagttaatctaaataatgtaccaataattattgaatatgatggaaaaatgcattttgaacctatttatggtgaagaaaaatttattcaacaattaaaaaatgatgaaataaaaaataattattgtaaagataataatattccccttttaagaattaaatacactgatatcaagaatatagacactttaatagaaaactttgttgataaactcaatagctgtgattaaactcctttaactgctgggaactcctaaagtctttagtaccaaagtgtaaaaatctaaagaatgttacaatggacaatcagcaaccaagactttgtaaggttcaacgactatcgaaaccactttatcagatcgttgtgaaacgctagatagagataagggagtagagtacagccaagcggtaaggtttgatcgtaataagatctgtaattccttttaaatggaaatggggagcgccatatttaggcgaagatatagtctcatctctatggaaacatagagcagttcataagagaacgcattagatgtagcgaatctaatggaagataatgtatagcaaaaactagaaatattcctgttatttcagcaggacagttgaatagggaagcatatcgtattctagaaacttcattagaaaaaggtaaaagcaatattggtaagaatctgaatgcatcacatattggagaatctgctttaatgcaggaaaatactgattatggtgtaattgttaataaagaggaatttgaaggtgttgagtaccttacatttaaattgatagcatctcgtgctaagaaaccatcaataacttattttgcacatccatttgaaaaaggtaatggattacgattaatggatgatattcatttagcaaaatcattatcagaagataaaattggtggagataaatttaaagagtttaatcccaataaggcaagggaaaataagggatcattctttaataataacaatagtaatcaaccagaatttcctccagtagatttaaaagttgaagcaaataatggtattgaaaaggatagtggaattccattctaaaggagaaaatatgccactactacctaaattatttcttaaaatatctattcttatacctcttttaacttcatcaatagtaagtactgaaactgtgttaactaagtattttcccaatttgagtattaatactcaaattgggatatttataattaacgttatattatccatgactgtaaatattttaatattagaagaatatgttaaaaaaaaagattacaggacttgcattctagtaaaataaccatagacattatgtctatggttattttttttttttcaataagaaatttcaatatctgtatattcaacatctgattgatcaaagatactgaatccaaaactaccttccaataatggagaatcagtatcagtaaaatctataattggatatccaccaactctgtcataaactctaattctattatggtacatcataataaaaatacaattattttcatcacttagataagtctgttcagtagttgataataattttcctcttactttatgcaatccatctgatgaaatatccatctcagaatatttaggagagattttatataaaccagataacataggataaactattcctttgtctatattttttcttcttatagtatatagataatattcatcctcaccttgcattctaaagattactcctaaatttccttgatgatatttacttccttttaccataacttttaaacgataatcagataaatctctatcatcaccagtaaaataataattatttagacctgaagagtaatcatttaaaataacactattagttgttcctttccaatcagtggaagaaggaattaaaatagatcctttattatctattaatccccagtctggattattatatttatctggtaatgattttatattaaagaatgcttttccatttccattaaaatgtttatatacgactaatagatctacaatctcttccttagtagcaataatatctttagtataaatatcatcaataccagatgatttctcaagaattagttcatcgttcatataaatttgtataacatcatctctatttccctgaatcatatatttagtatttggaactaattttaatttagaatattgtctaattgtataatttattccttgtgggatgaaaccattaattggatttatatcatcataagaaaaattattatcgtttaaatattcttgagtaaaaataaactcttcattaatgtcataaaaaacatttaaaatggtattcttttgttcatttttacttaaattaccatcaggagaaaatgcaaataaagattcattaatatttttatattgtgtatcatttgagcctttaaataataattgtagataagatgacggttgctcaatcatgtcatattgaagtttaaatttatgccatctatttcctgataacttaatctttgctgaatcatataaaacaggttggacttttagttgagaaatattcacttcaccattcaatagttcattatacattggttttctctcaactggaaaatcaatagtgatatttttaagagtcttacctttaataaatgtaacaattataacagagtctgtaaaattagcattattattaaaataagcatactctttattattttcaaatacaattttagtattatccgtatattcaactgttactgatgcacctgaaaataataagtttccattatcaattgatttataagttgttgtaatagctagatctctatatgtcttaattaatgaaacatcaatattaactttagcaatattagaacccttttcttgtttttcatatactttttttagaatatttttaccttcattgtccttgattaactctccatccaatacatcccaaccatcagtactaccagttttgaaatctgaattttttgtttgtgtttcaaaaatattctcattaattgtaaaattttcaccaagagtattgattacttgtttatcatcaatatttaatttacagttacccattacaatgggtttaaactcatattcatcttcattatcaataaaaatataaccttcaaagagttgtcgataattttttccaaaacttataggaaaacctgtatcacaattatcatccaatcttaatttattagacacaattgtattggttaacattgcgtatttgccagtattatctgttatcttatagattttctttaataatttacctctcataattggagaatatatatctttaaaattattaacaaagtcggtaatagtagtaagtttctttggtttttcaggtggatttaatggactaatctttttatcatatcgacttgataaaattcttttacttggttgatttaaatctctgacagtctctctttccaatactgttggattagacatattatttattgaatttttttctttttcaataatatcattaaacacacttaaataagatggatcaaatataataatattatttttattaaattcatcaggatgagtcatattgttaataaataacaataagtaccatagatcagttgtttcatacaataaatagcttatatattctggtctataaaagtatttatcttcaatagtatatgtcatataatactgcttgaaaatatgttcatattttcttaaaaaattcattccaaatttaatcttattatcaaatacataataactgctgatgttatcaagggtaattttattacccttggaatgtgtaatagacgttctcatgtcagcggcagaactactgtttattgaattatcatccattagaattagtaagtcattatctactatcattaattacacctctatttctttttgtatttatcaatattgcttttaattgtctgaaagtcaaaatattttgctttcacatacttatattcaagtgttgaatattttaagttttcttcccatgattcttcaagacaatcatctatatattttactctagtaaaatctaactcataagtccttaaaagaggtgtaatgactttatcgcatagatgttcagctagtctattttcaatagtattgactgaaaaatcatccccaataacaatcaatatactatttaaatacttatactcaataactcctgctgatactaagtcctcaataaaataactaggttgaaaatctgcaattcccttaaatactgcataatctctatctaaatattcttcaaaataatggcaaggtaatgctggtttctttaagtcctcaataaaatatttttgccaaattccccaagtatacttattagtactttggattacagagggatcaatataaactttttccattaaatttcttgcatgagttataataatatattcagtcttacgtctaaatctcctatagttacgaataatatacacttaaatatcctcctatcaagcaatcgttcctgtagaatctctccaattttttccatcataccataatggtttctttagattcttatcataaatctgcatacctataaatagattttttgttgggcgattacttgtatcatatgaatcattatttcttcctgaaattattaatttaattccattaacatttgtgtaaaataattttcttgtctgtaaattaatgagaaatttacctactccaaaatcttttattgtacttctactagtttgtatgatccatttataattcacaaatttccaaacatcattatttctaatatcataaataagattattattaactgcaaaatataaatcactaaatgttgtttcattttgggaataacatgagaatccatattgttgtgcgcctataaattttttaagaaaatccaatgatgttaactcaatttctaaaatagattcctcaagtagagttttactattaaataaagatgttaatgcctgaattttatttccttcacgtctaatacttattttagtaccattcggtatatctttccatgctccagtggtatcattgatattcttaaaggcaagtaccttttcatctgatcttccataattataaactaatgcccattggtaatttactccattaacttggacgtgtccttggtcattgtttcttactcttattgccgatattgtatactctcttccactagaatcagttgtaaatgcagcaattaaaccaatagtatcatcatctccattagttgatgagagtactgcttcatgaacaaagttatcatatttttcatgactaacaaaacctatatatgtgctagaatttatagtacatttaatactatcactagcgtcactataactccatttagtgatttcatcagtagacgctggctgatcttctgatttcttagaatgagaaaatctttgccattcattgtatatttctttaaaagtaacttcctttcctttagcatcaattaattcttgatcattttcaataaaatttccttcatgtaatgtataatccaaggcaacatcactagagttgttagatgaaataaaataagattgaccttcttttccaataggcttattttctaaatcatcccaagttctaggatctcccttttctcctttttcacctcgttcgccttgttcacccttttctccttgttcacctttctctccgggaattccgtccattcctgctggtcctggttctccccttggaccaggatcacctctctcacctttttcacccctttttccttgctctcctttttcacctcgttcgccgtgttcacctttctctcctgtttctcccttctcacctttctctccctgttcccctttttcgcctttctctcctcgctcaccatcttttcctttcatatcaatttcatctccatctttaaggaatgttattccttcaggacagattctaatttgatatgaatcgttagtaatatagaagcatttattgctcttattatatatgagagaaaattcatcaataatatttaaaatattaaatttattgctttcttctctgagagatttggtaaatttattatcgctgatatccccataaatattatagttaagatagtatgctctttgaggatcaccatctaaaaatacaacaacaacatgttctcctttttctggtattataagttgttgatttttaattaatggcttacatacaatcccattaatagttttaacagatgtttttgttatatcatttccaattatatttgtattctttatattctcatttgcaattaatatattatctttttcatttatacttataaatagtttaggtatatatacaataattgagttatcgtcattactttccataacgattccatcaaaaactccttcaaaatttgcatttgttaataagttattctcaaatacatctagcattattaaattcctccttctctaagtaattgttcaaagtttatttaaaaaatgaaatttatattataataaagataaaaatataataaataaatggaggaagaacaatgatttgtgtaattgacaaggttgatagtgaatggagtaaaaaagcaaaatatgcaatctttcattgtttgagaactttacaaaaaaataaaatgatagattatctttatatgaaaaaggtagattctgttattttaagaaatagaatggataatgaaaaagaaactttacagggatactatgaatttcataaaaaaagaatcacaattattctggatagtaaatttttacttacagaaggtgatataatatatacattccttcatgaattagggcatcatttttgtggtgaacatactttctttaaccaagattacaacccaaataaaatgaatatagaatattgtgaagaagaattaaaagctgatagtttggcaagaatattattagttaagttctttgatagaaacatttttaaggatattattgaaaatgtagataatagaataagcttctttaaaagaaagtataaatcgcttaagaacccaaatatatggaaaaaagttatatcaaatgatccttgggtttcttttacaatgaattatagtgttaagaaagaaaatccaacatatagtattagttttgacaataggaatattaatccaacttcattttcaacgagacttatatcttaaaggagaagtattatgattagattaacaaaaggaaagttgcaaaaagtaatcaatcatcatcctagttggacaataaatgaaatagcagatgaactagatgtaagtgaatcaactattaggagatgtattaagagttttaatatcgattataagaataagagaagaggtagtctatgacagaagaatattcacatcatactctttatcgggaatcacatctttcattttcattacttaaagagattctatcagaaaatgatgaaacattagaactaaaagatgataaaatactcctttcaggaataccattaagagataattatgataagatgctcctagtatatagtgactcttctaaaaagttaagaagaaaaaataaaaagaaatatgactattttaatgcctttaaaaatcaagaacataatgaatatattattcactttctaaccttagcagataataatattgattgtatcgaaattgaagagatgaatgataaattttcagtaaaatttaaaaatattgataacaaggtattgaaagaaagggtatctgaatgtaatataaatgataaaaataaaataataatggatatgttacttaaatattataatattatctaagattagatagagagaagaggagagacaaattggctgatataactcttacggataaacagaataaagctaaaaatgaatgtcttgattggtactttggtagggagaccaacggtaaagatccagacagaatattcactattgcaggattagcaggtacaggaaaatcaacattagttaaatttataattgaagagataggtttagatgttgatgaggtagtatttattgcatatacaggaatggcggcaaatgttctaacacgaaagggaaatgtaggcgctagcactattcacaaatttatctatcatgctattcctgttaaagatccagaaacaggtgaaatccttaaatttatattcaggttaaaagaaaaagatgaaatggatgataaaattaaattagttgtaattgatgaagtatcaatggtagatacaggaatgcttaacgaagtacactcttttggtattaggacaatggctcttggagacccaggttataaattggcttgggtataaaacttctttaattgctggaatacccttagagctttttaaactacagcataattggaaacaataagtgcgatagttttaaaaattaaaaagattgggcgatcagcagctaatctccttaacattagaaaaggcgtatctcctaactatttaaatatatattataatgttaggagaggagaattaaaatgccaaaaaagaaaacattagaagaatttaagattgatgttcttaataaattaggaaaagaatatgaagttactggtgattatgttaataataaaacaaaaatagagatgaaacattcttgtggttatatctattattcacgccctcatgatatcttggtcaaaggtaatggttgtcctaaatgcaatggcggcgttccaaaaaatctagatgatttattaaaagagatcccattaggctataaatatttatctggatttgaaggatataagaaaaaagctagatttattcatactgaatgtaattttaagtttgaaatggaaccatctaaactaattttaggaagaagatgtcctagatgtggtggaaccaagaaaaaaacacatgatgaatttataaaagaaatagaaaagtttaatgattctcatgagtatgaatttactgaaagttatattaatgatagaactaaaataggtataattcataaagaatgtaatcatgaatataaagtaactccatctcactttttaagaggaagaagatgtccaatgtgttctaaaataaattctaaaggcattagaataattaaagaatttttaaattctaatagcataacttatattcaggaatatcaaaatcctttatttattgctaagaacaatcgtccttatagatttgatttatatttacctgaatatgaattgataatagaatttgatggagaacaacatttttctagtaaaaattttgggtatgaggcatttatacaatgcaagaaaaatgacataataaaaaaccagtggatcaaaaacaatgatttatctttattaagaattaattttaatcatcaatctaatttatcaattattctaaaatctctttttctagatgaaggagaaagttcagagactatcgaaaaatatggattatattatatttctcacgattcttatataatgaatgaagaggaatattactccataattgagtagagtactctacaagcgattggtaggggaaacgggaagcacagaagatatagtccgatctttatcgaaagataaagcagttcttaatgaacggtatgaatttagcgaattcatatgaacataatagcaattaccacctgtaggtaataaaggcaatactctattacaaaatccagatgtttttcttgatgagattatgagacaagcattagataacccaattatttatttatcaatgttggcaagggagggaaaatttatatcatatggaactcatggagatagggtacaggtaattagaaggcatgagttatataaagacatgtttttaggtgcagatcaaataattgctggttataataagactgtacaaagtattaatgcttatcatagacgatttatattgggaatagaaaatccatttcctgtagagggagataagattatttgtggaaaaaatcaatgggaacacactatttatgaagataatttagaagtttcattagtaaatggtcttataggtagaatagaatctattgaaaatcaaaaaagatctgctacatataagataagttttagaccagaattctttaaagaagaaaaattccctaaattatatatgaataaaattccttttatgaatgaaaaggtaagggactcatttgatgaaaaatctctttatgtatttagaaagaaaattattgaaacttacggtattagtgagtttaaatttggttatgctattagttgtcataaaagccaaggttctgaatttgataatgtactattgtttgaagaaaaattacctaatagaaagtttcataaaaattggctatatacaggaattactagggcaaaagaaaaattaattttagttaaataggggagaatctataatgactaattgggtgatcagtgatccacattttggacacaaaggtattttaaaatatgaggaaattagagatttcaataatactgatgaaatggatgaagctattatcaaaaatttcaatgatactgtatctgaaggtgatacagtattttggcttggggatatgttcttctgtaaaacagaaagaatgaaatatattgtagataaacttaagaagactagaaatattcttgttcttggtaatcatgataatggtgtttcaaaaactaaatttaaacgttttggatttatgccttatagaatgtatcaatataaagatcttattcttactcataaaccactcagtgaagttaatcttaggattctttctgattacggtattactaaaaatatccatggatatgttcatagtaatattgaaggtatgaatcaagataaatataaatgtgtaagtattgaatgtacggatctgaagccaattaatattgatagtctatctagtattaatccattctttgaatataatattaaatttaatgtcactaatgcatttggaatgatttgtcttccactttacaaaataccttctgaaaaagaattaagtattgatgaagttaaagaaatggcaataaatcttcttaataaacaagagaatgactatgttattaatgagattaagattacgaagaaagtactattagatactgaaattactctactaagaggagctagataaacatgtatatcttaaaataggttaaataactctcttcaaatttgaagagagttattttttttaacgtttaaatacatgatgaccaataactgtaacagttggtctattatctaaccatctacttgttgctgttgaaggattataaaaataaagtgaaccttgtccgtttcctccaatattaaatgcttcatttactgctcttacagactcggaatcagctgacttgtaaatagaaccatttgaaactggagaaaattgaccactttcataaataactccttgaatagaattcgggaattgatcattatttacacgatttaaaacgactttagcaacttctactttaccagcataaggttcactttcagcttctgctctaactaatctagctaataattctttatcactagaaggtgctttaactgttgatgaagtagtttgctttgattgttcagtatttttaactgtaggtttagaaacagattcacctttagctgggataataatattttgaccaatcaaaattaaatcatcccatttattatttgcttttcttagttcataaagtgtgataccatttgtttgactaattccccaaagcgtttctcctttttgaactgtatgatttgtagccgcatatgctttatttgccaataatacggggatggctaataagaatgctaaaactattaaagccttcttcatgtatatcatctccttaattattatgatattttgtttaattcaatgttataaaaactattcattttatatggatcttagaaatttttaagaagggatatgaagaaattgaattacttttcaaatagaaatattgatgatattataaatgaaaacaacacaagtaaaaaaatatttttaagtgataaagaaaagatattaatgaaagcagggaaaaatcctgtaaaaattaattatagaaaaattaagaagaaaaaaagaaaaggttaacagtaaattaagatataaaattataaggagaaaacattatgcttaattttattggtactggaagtgcatttaatactaaacttggaaataattctgcttttattaaaaaggacaaaaccttatttctaattgattgtggtagtacaacatttagtcgaatgcaagaagctaaattattagatgatgttgaaaagatagctgtactcttaactcatacgcatcctgatcatgtaggttctctgggcgacttaatcttatatggttactattcaatgggaaaattaggagaaccaaatgttactgtttatacccctaatctcttaagaattgagaacctactttggtcacagggagtttcaacaaaaacatataatttagttcaattttttgataaacgttttataagattcggtgctcaagaaataggtttaattgcattagaagttgaacatgttttagaattgaattgctttagttatattatcaactatgatgataaaacaatatattacagtggagattcaaatgaaattcccgctcagatcattaaaatgctagagaatggtaagattgatatattctatcaagatacatgtaaggcagattattctggaaatgttcacctatcattaaagaaattagaatcacttataaaaccagaatatagagataaagtgtattgtatgcatcttgataacgattttattgaagaagaagcatgggatttaggttttaaggtagttgaatcgataattaattaggaggaatatattatgacagtagatgcaattaataaatatattaaaccatatcttgcagaaaatattgaaaaggatgcagtattccatattcaaacgactagtgtaaactatttttatacatcacgaatggaagatattcaatttgatgatacaactgaaattatgtcatttagagatgttgatagtcgagtgctttttcacatagattatagtgatattaatattgttgctagaaaagataaagcaaatgattttaacttagcaatttattcataattataataccataagggaaaccttatggtattatttatttaactaaaattgaaaatgaataacaaaaatatgattgaaatttgacctattttataaatttatattattatatagattaaaatatttaaaataggagatgaaaaatggttaaaatttttgttccaatagttgaaaataaataaacttatattagatgaaaatgggggaatatttgatggtaacgacaaaagtaaacaatcaatatagtgatgaatcaattgatcttttggaaggtttagaaggtatcagaacacgttttgacatgtatgtaggtggaaaggattcagcggcatttcatcttgtaaaagaagtagtggacaactctattgatgaagcgattaatggatattgcactaatattaatattacatatgatgaaaaactaaatcaaatttcaattgaagataatggtcgtggtcttcctactggtattaataagaagactaaaaaacctacaattgaagtactttttacttatatgcatgcaggtggaaaatttaataaggatagctttaaagtatcaggcggtaagaatggtattggtttaaaagcagttaatgctctttcaagcttcctattggttgagtcatttcataatggcgaacactattcaatggaattttctaaaggaaaaatcgtcaaatcattaaataaacttggaaatactacaaaacgtggtacaaaaattacatttatacctgatgatgaaattttaaaacaatttgccaaaattgatcaatctctattaaaagaggaattaaacaagagagcatatatcaatgctggtcttgaaattaatttaaaaattggtaaagagaaaactacttttaaacatgataacggaattattgactatcttaatgatattaatacagatcaaattaatgaaccaatcaattttgaatttactgataaaaagggaaatatttatgaagtagtatttaactatgctaatgaatcaggagaaaatattaaatcatttgttaatggtatctcaacaagtaaaggtactcatgaacaaggttttaaaacaggactaacagtggcattacttgaatttattaaagaaaataatctattacctaaaaagttagaaaaactagaaattaagggtgatgatattcgagaaggcttatattctattattagtcttaaactcttagaaccagaattccgaggacaagtaaaagatgaattaagtaatagtgaagtacttggggaattaaaaaaggctactcatgaaaagacaaaagattggctatcaaaaaatattgatattggtaaaaagattgcaaatcgtattattgcatttgcaaagggtagaaaagaagctaatgcaattaaagacaaaattgtaaaagtaaatggtaattcttctggtttatcatttaaatctgatttccctgattgtgatagtagagatattacaaaaaacgaaattattgttattgagggaaattcagctggaggtagtgtacgtaatgctagaatttcagaaattcaagctgtattcccattacgtggtaaaccattaaatgcatatgggttaactcatgctagaatcctagcaaacaaagaatttaaagaactaattaaagtaatttttggaacaactgatattaagaatattagttatgataatattagatatggtaaaattattattttggcagatgccgatgatgacggtgaaatgatttgatagctgtcaaaaaacctgattaattgctggaacatccttagagtttctattactaacttattatagtgatataataagggctgagtattatcctcagatatagtaataatatagaaaattggacaatcagcagccaagtatccattaaattatggataaaggttcaacgactatcgaaaccactttatcagatcgttgtgaaatgctagataaagacaagggagtagagtacagccaagtggtagaggtgtagagtaataatctaataattcctctttaaatggaaatgtcaggcgctgtatttaagcgaagatatagtctcatctctatagaaatatagagcagttcataagagaacggtatggaattaacgactccatatgaagattgtgtatcatattactatgttgcttcttgcatttttatatgagcattttcctaaattaattgaggatggaagagtatatattgcactctccccattatatcgtgttagaaaaaataaatccgataaatatctttatttcaagaatgataaagagtatgataaatttgtaattaaagagattggaaagaaatataaacttgatccaatttctcttagtaaattcattacaaacggaaagaaatatacaagtttatttgatagtattagacatagatataatattgacattgatgtattaaatattattgaaaatcatatgagtgtaaataatgatattcgcactaaagatattgtctcagatctaaaagatattgatctagcagttacaaaagaaggaaaagatcttaaagtagaaggtttatacagagatacttggcataaactcattattaatgatgaatttgctaaacatattgaagaactttcagcggtatttaatgatttagacgtagtaacaattgaagatgcaaaagacggtcatattgtaaaagaagatgaatatatttataatgcattaaactttttaaataattcaattacttttgtcagaaaccgttttaaaggattaggagaagcagatgctaatgagttatttgagactactcttgatccaaagaaaagagatttagttcaagtcaatattaatgattttgaatctacagatgagatcaataagattctatttgggaataatgctgatttacgtaaaatgtttattgataaatatttgtaaaattactatttcatttaggaggagaaataatggcagatattaaattagttgataaagatactgatttatctaatttaaaaccaattggttgggatttgaagattaatggagtagattttgacgtatatcgaattaatggatataatcattctattggtggtaaatggggaaaaaattgttattgggcttgtccttccaatgagaaaccaacttatgaaaatcttattcaatttagtggtgatgctcctacttggggtgttacatttgacagaatcaattatgttaaaactaaatgggatgaaacatcagttaatgctaatggtaattgttggataactcgtaatggtcaaaaattttatagaataaatgcacgttatttagattatggattagcaactgcacagcatgtactagtaaaactattagaagattgtccacttgatttgcatatgagaaactggaaagaaaaagctattggttataagatttggtataataatcaaccagccaaaataactgatattactagtaacaatgaactttggattgtaccagatggtatttcaaaatttgaagcacccaaacattataaagatcctgaagattatttggattatgaagatggaatgcttgttgatttactatcaccaaatatttattggtttagagattaaaaataataacaaccttacctactattggtaaggttgttatttctattaacaggaggttattatgaataatattaataaagctaaagtaattgccgcaggttcatcaattcttattgccattagccttactacatcaacagttacatataactatatgaataaaaagattgaaacaaaagaaagtgaagttactgaattaagagatagttttaaaaatctgaaaaaagaaaaagttaatttagaaaaagaaaataaagatttttcaagtaataataaaaatcttgataataaaattaaagaattaaagaaatcaaaagaagaactagataaaaagaatactgagatttcagaagaaaataaagaattaaagaagtttattgaacatgtacaaaaattgcctcaatggactgaacaagatgtaactcaaacatctaatactagtaaggttggattgaaaattgctctaaaagatactgggttagatggtcttgaagaatcatttattgaagctgaaaataagtatggcattaatgctatctttttaacatcattagtagcacaagagagtggttggggaacttcagatagagcaaagagagataataatctttctggttatgcagtttatagtgattcaagtaaaggaaagtcatttgctagtaaacatgatagtattatgagtacagcaaaattattaaaggaaaattatgtaaaagaaggaagaaaagacatttattcaataaatgataaatatacacccgtaaatggtcatgattgggcgaataatataattagaattgctaataaattagttaaaaaagcagacgttaaccaatatattaaaggacaaaaaatttaaggggattttaattatgaataaaagatataataagagatataataaaaatgaacaacttgcaaatgagttaagagactttattattgaaaatgaatttacaaatgttcgaatctactttaataataaagtatatgactggtatagttctagtaaagaaccaattttaattaataatattagaccaacagaatattttccgactgcaaataataaaactgtttcaatgagttttgaaggaaatctatattatcctatgaacttcggtgataatgataatgactttactacttataatacaattaaaagtatttttaaaaaatatggttattattttgaatttggaaatgcatggaatataactgcctatgatttataaaaggagaaagaataataatgggtaaaaagattaataaagaaatattagaaaaaataattaaagaaaatcctgattggtcgcaaaaacaaatagctgatcatttaaatttatctatatcttatattggacaattaataaaaaaatataatattgattataaagataaaaatataaattacaccataaaagaggaattaacaaaaattataaatgaacatcctgattggtcgcaaagagaaatagctgaacacttagggacggaaaaatctcatgtgagtcaattaattaaaaagtataatattgattatactataaaaaagaagaataaaaaaataattatttcaaaagaaaaattaattgaaattattaatgaacaccctgattggacacaaaaacaaatagctgaccatttaggagttgtagaatcctatatcggtaggttaataaaaaagtatgatatactatatgttaaaaaaggaaatcaaagcaggaataaatttatggaaaaaaatttaatttcacagtattttatgaatgaagaagttatggcagatttattattttcagtaattaagaataatgaattaaatcaaaaagaaatagctgatctattagtaaaaagattaattaatgaatatgatctaaattataaattaaaaactataactaaagatgatttattggatgtaattaaagagcatcctgactggacacaaaaacaaatagctgatcatttcctagctcttccaaatacaattaattctatactagtaagaaataacatcaatcaaaaagaaattagagaagaatatatggttgaaaaattaaaagaattaattaaagagcatcctgactggacacaagctcaattagctgaaccactaggaattacaaaaacatatgtaaggaatttaattattaaatataaattagaatataataagaagaaattaaaataattttaaagtttatattataaaaatgtaacaaactagataaataattgggaatagaaatggagagagaaattattatgaaaatgtcaaatctaatcaaagcaatcgatattacagttcaatcaggttcagtgcctatggttatgggtcacagtggtattggaaaatcaagtattgcaaaaatctatgcagatttaattcaagaaagagaaaataaagatgtagtatatgttgagttatttggttctgtccttaaagaaggtgaattaactggtatgccaattaatgtcactaaaaactatagcggagaagaattaaatgtaacaacatatactattcatactgcaattagaaaactatgggaagcaaatgaggcaggtaaaattccactattattcttagatgaattaaaccgttctgatattgcagtacaacaagagttaatgcaattaattcttacgaagcaaattaatggaaatccattaccagaaaatactattatgattgcggcaggaaatccagattctgaagatgatgatggaattgactatcaagtaaatactatgaactatgctttaagagatcgttttactgatcttcatttagaagtagactctgacgaatggattaaatgggcattacaacaagtatcattttatgataatgatgacaatctaattaagacagattctatgatccacaagaatattattgaatttatcacaaatgatcctcttcagttacatatcattaatgctgaaaatgaaggtaaaaatccaactcctcgtgcttgggaaagaacttctgatgcatatagatattttgaagagaactatgatatggaagacagtgataataaaagagctttctggggagtagtagaaggaaatcttgggaaaaatactgctattgcatttagaagttttattgaagaaaattccaaaccaatgattaatccaaagactattattaataataaagatttatctaaagatacaaagctaatcgaaaaaattaaaaatgaaactatggcaagacaaaatctattaactcgctatgtatatattcatattggtaataatatcgataaatttaaagaaaaagagttaaataactttattacttatcttgatattattcctgaagaactgctaatgatggcaattagtgagattaagagaaatcctaatgataacattagttctatttttgaaattttaaaaactaatcaaacttttattcaaaagtttgttaatatcattcaaaatttaaaataatagagatgtaaaaaggggaagtaaaaatgtctattcttaatagtgataataaaaatgaaatttataagtatctaagatcagtatatattaaagcagatgctccttcagttcaagtctcagaaaataatcaaaagttaatagagagatatttctctctattaactacttccttgatcttaaatgatcgggatggagatagtagattctatgcttattttttgtcctctgttaaaagaactattattcatgatcagtattttgctcctgccgcagtatattatgatgataatagaatgacattcgtgttattattaaatccatataaattattcttatttgaacaagatgagatcattgctgtactaatgcatgaattacttcatgttgcaaatagccatatctatagacacaaagttttatccactaaatataataaacttgacatgcaaaaagttaacattgcaatggattgtgcaattaatcagtttattaaaaatttacctaatggtacaattacacttaaatcagttaaagaaatgaccggagtaaagaatattagatctaaggcaaattttgaatattacctagaattattattaaagagtaagaaagccaataaaaataataaatctaatggtcaaagttcaaaagatcctaatgaattaaatgataatgatgttgattctgatggaaatctaaccgaaagtggtaaagaaaaaagattatcacaatcaagaaatcatgctcatgataaatgggatgaaattgaatctagtaaaacagtagagaaagagatgtcagagaaattaaaagatatccttcaagatattaaaaatagaaatagaggtaatcttcctaataatatggaaagtatcttgcaatcattattaggtaagcaagaaattgcatggcagaaaatttttaagaatatgattggtggtttaaaagttccatttaagagaactcctatgcgtagaagtagaagacaacctgatagacctgatgttctaggaaggatctcggacagagaatgtaaagttgcagttgctttggatatgtcaggatcaatgtcaaatgaggaactagcatggtcgcttaatgaagtaattggtttattaaaaggaaagaaatcaaccgttaccatcattcactttgattcagaagttggaacagtctatgatgttagaaaaaagaatgatattaaatttaaaagagacaaaaatggtggtacagaattttcacctgttattagctatgtaaataagaatttaccaaaaacagatgtactagtagtctttactgatggctttggtgaatatgaattactagaaaaaccaaattgtcaaatgttatggattattacaagaggaaataacttatccgttcgaaaaccatatggcaaagtaagacgtaataattataaggaggataaaaatgaataaagaaataaaaattaattgttttaatttattatacagtgattacataaaaagagggaattctggaattaaatataatgattctaaagatatagctgataaactaaccagttatcatacaaaattagtgcgtattattgggacaggacaatttggatggagttttaaattcttaaggagaaagctaatatgattgataaattaaataaacttggatttaagttagatatagacaatgaagctttattaatagaagatgattttgtacaaaatcatcttccatcacatatttatgatgtatataaagagttagataaaggctatcgctaccaaccaaataaagttatagattatattaatatacgtatgttttgtttaagagacgatcaattaatctataattggtattttcatgagaagctttgtgcttttcctagaggatcaagttggattactgaaagatatgaaccaagaattactataattagtttaataatattaaataaattaattgaaaataatataaaatttaagataaattttcctaaatcccttagacaaactgatacaggtaaaattatacatgagtgttattataagatttgcaatattaatactataaaagcaatgaaatcaagtatagactataaacttatttttaaacaagatctcgcaccaatatatcgtaaagtattagtatatttatttaataataaagagaatagagattacttttataattactatgatgttcaaatcccaactagaaataattcaatttatactagtttttctaaaactcatttattatttggatttaacagacctgatattgatattttaaatattaaattcttaatgcaagattcacttgttgatggtggaattactcttgatcttaaaactgattatgacatattttatgatgatgaggagttaaataataaagaaaaaattaattcttattttcaagaattatatgatgattttaaaataagaatgaaatctaatttctatacggcttataatccaatagatagttcttttttatctaaatatacttttaatattaacaatagttcattacatttattattaaataaagaagattatagaaattttttactaagtttcaagttcattaatcgacatgaaaagtctttagagaatatttcatattttgattataaatttaaagaaactatatgtcgtataataatttatattatggaatatcaaagggaaaataaaaatacaatattattaaataggattgaaaaattcttagcaaatgatgcatttgagaaatatttacactttaaacactttaaagaaaaattaggttggcagaatgaagaaagtgaaagaagaataatagaatataatgcaattgataaattagaatcattgtaggaggttattgtattgagtgttattgagtatctaaaagaattattattagacgttgatgaagataataatataattataatggaggataatgatctagttagcaatgaatgtatagttagtatgctaaatgatataaataaagaaagaaaatttctttttgtagaaaatgatatcgtatactttgatgcatcatttataatatataatgtttggtcttataagaaaaatcaagcaattaatagttattttcattttaatcatactgaatttgctaattatgttgttagtagcattgttaagagattaatagatagcgatcatattactttagatatcatttcagataaattagatcaaatgaccttattaaaatcaggattaagagtatatccagagttaaaaactatttatagtgttgaatatgagttagcaagttatatttatgatcatgaatttatcaagagatctcttgataaatcactcatagatgatggttatagatcggctgatcaatcagtatttagtaaacccacaatacatgaatctaagttaaacttaattagaccggatttagatattctttattttcctttaattaaagattttaagacaaactcagcatctataactttaatgcaagattatagattattatttaatgatccaaaattagaaaaagaagaattaattaatgaatactttaaagatattctagaagatactaaaaagagattaacagttgttaaagaacaaagagtatataaacataatctaaattcattttatattcatttaattcaattagttagaggtaaagttactaaaactagaaaaaataaaataaataaacaattatcaacttctagagcaagattccttgggaaaaaagagaattattttgagggaaaatttagggaaacaatttttaaaataatactctttatgattgaatattttgaaaaagaaaatttggagaaacaattagaatcaattgaaaaagtattttctttaaaaatatttaagaattatattggttattatgaatatgatgatattcgaataagttatttgaatgatgataaatttgctaaaagcagagaaagaatatctagatatgaagcagaagaactcttagaacaactttaatttagaatgatatcctttttataggatatcattctaataattattatactgcatcttcgtcaataactacttctctgtcagtcttagtcactttttgtaatatccaagtaggaaaagtaagttcatgaataccagtaaaagtttgtctatgatgttttaaacataatacaattaaatttctaatatcatctacagttgtaataggtacttcatttaatttttttccatatccgtaaatatcaaacaactctacgagttcttttaatttatcatagtcacagacatttttcatagaccaactacataggaaatgatgaacttctaaatgctcagtgttttcacatatccaacatttataatggccatcttcttttaatctttttttagattttctaaacatagatgattcttttctttcttcatgttcaggaattaaaacactttcttttaatgtagttctatcaatatgttctgcgattattttactcatattaccactccttctagctatattattatgtttaaaaaaatttaaaaatatatattatacttttgatactaaataatttgagaaataatattaggaggactatttataacagatactcaaaaactaattgaattaggttttgactttgattcacaaggaatatttatttttgatgaatctaaagagtcaaagatataattaatagtaatgagttttctagaagtatgaagaaaattaaagaatatgaggcaattaatataatggaatcattataaatatggaggatgagaaatggatataaaaaaagaattagaaaaattaggaattgtattaaaaaaggatgaaacttcttcaaaaaatagttataatttatatatgactaaggatgcagaagaaaaacttatcccatatcatgaaagacttattatagagagattaaatactccttttactctttatcaaactgattcagggcaacatatatttaagctacacttatttaagttaattgataataaaataataatagatattgaaaaattatctatacaaacagaatattctaatttagaatatatggagattcttatatttctctctgtaacagaaaaattattagactataattttcctttgtcatttggaaataatttatttcgtaattatgtcttaaactcatattgtatgagcgagaatctaattgaagaaaatttaaataatatcattaagtatcaaagtaatgatttatttaatgataatgatgacgcaacactagaatactatattgacatgcgtgtatctataattagatctaaagttgttagaagatgttataacctagattattgtactaataatagatttatttcaaatccagtttatagatattttaatgatataaatgatgaaaaaataaatttatatcgtcttgatttaaatcttttttatgttccatttgctaatgttaattttggaaattctcatatttcagggttattattagattacatcattttaaataatgatcaaaaatttgaagctaaagataagattgataagtattttgatgagttagtagatgattttaaaaaaagattagaattagatccattagaattatttaaaaattcgtcaactcgtagtcgtggtccatattataatatagcatttagtcttacttatgaagctaattttattaaaacaaaattaaatttttctccctctcatcaacatcctttaaacaaaaaaagaaataaaaaaggcgtttatggtattgattattttgatagtaaactgagggaatctttatttaaagttattacaatcttaataaaacattttgaaactttaaatcaaaactcatttttagagaaaatggaaaagacattagctactaatgaaatacaaaattatattggttataatgtttatccagaattatatcttaataatccacaattcaaaaatagtttaaaaagagttagacaatatgaagcattaagaatattagattctatttaagggggataaatatgattaaaattgaagaaagattaaaacagtataaaattaatattagaaataatcaactttatttgagtgaagatagcgctaaatatattttagatagaaaattattagattattataattatatattaaatgaatctaataaaagtgaatatttatttaaatatagtcttactgcccgtggaataagaattgataatgataataaaataattgttgaacctaatctcatggtatatcagatacactggggatggacaaatccacctgaaattaatacaataattaaagtactcattataagtgaattaataaataaattgatggatgaaggttatgaagtatttttaggtaataatacatcaaaggaaagaaatcttgaattatttaggtggatgcaaagtcaatataataaaaagcacatattatctagtattgataattctttaaatgctagagaagtatttaaagacatatctgagtatttacatatttcaactagaatgctaagtgatagaattctcaggaatagttatactaaggaatatgtaattaatgcgagacccgctaaggcttttagaccaccatatacattattcaatatctgctttcatgatttggagctagattctaaattgaatagattagatcttgacttatactatatgccttttattaaagatattgttaataatcaatttggtattgcattaatgaaagactatgttcttttaaataatgatagagagcttgaaaattttgataatatagataaatattttgatgaactattacaagatgcagaaacaagattaccgataatatctaatattgaaattaaaactaaatctacagcaagtgtatattttcagctaattgatattaaagatataagacaagttacaattattaaaagaataaaatcaaaatataaagtaacttctaggaacaaacatccattatcaaaatataaaaccttaaaaggttctcaatattttagtgcaaaattgagagaatcacaatttaaagcactattattaatgataaaatactttgaagaacattgtaataaaaatgatttagctagagcagaaaaaatattatcacttaaagaagttcaaaattatcttggctatgaacactataagcatttatatgaaaataatccaaaatttaaagatagttttaagagagtaaaagatttagaagctattgaattattagagaatttataattgggggatttaaaatgcctgaatttaatttaatggaaaatgtaattgaagtaatagaggttccaagtggtagtaaatctggtttattcccaagaaagagagaatctggttttgataaaatattaaggcaagaaattgtaccagctcaaaagaatcatcttgatacaattataaaacgaatgaaagcaataggctatgataaaattgctgtacttaacacaaatattcaattttattgggagataactacagtcgaatatccttttaataatgataatcagctacatataacattagttaataaagaaaatactattgaatatttaagtttagtaaatcttaaatctggatttttttcagatagaaaatttaataacctaacaaagagactccaagattcgggagaagatattggaaagattatgagagcatatatagaatataatttaccatattacttttcgagaaattatgagaaatatgaaaaggagaatgaagaaatgaaaaaagaaaataataaagttaacgataaaattaataataaagaggtaaatattctactagccccattggtaaaagatttcttaggaacaattggtagtattgcaatattaagaaattttagtgagtattatgaagacaagtatattgaggataaagataaagttgataaatattttaatgaattaattgatgacgtaaaaatattattaaaaaccaaaaatgatattacattaattgatcctaatccaaaaaataataagtatattaatcttgttaagattatgaaaggaaaagaatcagtatttaagaatattaaaagaagcctatcaattaataaaaatagtaaacatcctttattaagaagtgagcttgaaccactccattcagagtattttgaaggaaaatacagagagtatatttttagaacaatgcttgtgttaattgaattctttgagaatagtttcaaggaaaatccaatggcaactaaacattctgaatttcttaacaatattgaaaaagctttatctaaagacgaaataaaagaatatgttggttatgatttgtttaaatctgattatgagaataatcctatctttgaagaaagcttaaagcgtgttaaagggcattcagctgttgatatattagaatccctataataaattcctctaaacccgacaataccatagtttactatgctatggtattgtcattacaaaatctaagaattaacaacatgaagatgacatcacttaaggaggaatttatcatgaagaaaagatgtaataatattcattgtattgataatagtattacagaaactgatttacaaaaatgttggtattgtaattctgatctaactatggttggtaaacctattgatctagatattggtcagaaaatttatgttaacgagcagaatcatttcttagggatatcagaaggcaatttaatcgaatgtgaaattactaagattaataaatctgcattttatgctaaagaaaaaaataaagattatgaatatagatttaatcgaaaaacttttacaggaaaaggtattcatgtaggaagtatgttaactgcttatttaacagtagatcaatttaataaagaaatggattaccaaaaagaaagagatgaattattggttaaaattaaaaaaaggttagatgaattaaatttagaaacattaaaggatgtaaataattttattaagtaaaaaggagatatatttgaaaatatttaaaatgtctcccttatataaggtttaaaaagaaaaataaatagatattataataatgagaaaatagatattaagggagagagaaacaatgacaatgacaaaaccacttaaagagaaaacactaagtaatatgttaggaaagcttttcaatgaagaatttgaacttactaaagagcaacatgcattatatgaaagacttaaagagattgaagcacgtaaagaagagattttaaatgagagagatatccttcaaggattaggggaaaaagaagatttagactttgttagtgtggatactgaaactaccactacaactagagttacatttgatagagatgagaaaattcaatcagttgagattaaagaagaaaagaaagaaaaacgtactagaatgtctcaatctgagaaaatgaaagctattgatacattaaaagagattatggaacaatatggtcgtcctatgaagctaagtgatattattgaagaattagctaaccatggttatgaatggaataaagtacaatctgcacgtaagttcattacagattcaggtattttagattcaccttgtcgtggtatgtatcaattaattagaaaattttaataagagattaattatttgggaataaaaatcaatcaaccattattagattcaataatggttgattaaaatggataaagatttgttaaaaacatgtttagataaaattgaacgtcaaaaaagggagttaatagctgaaaatgcaatgatgcaaaccatgtaagtagtagaagattagtcttctactacttataccaacaataaaaactaaaattttttatagggtgataattatgctaatgacaaaatcttttaaaaatatacacctaattaaatgggatatctatacagttcttaaaacacatgataaaatattagatatactatcaaatagagtaaattatcagaaagtacacattgaaacaatttatactgaatccggaatccaagtagtacaaaaattaactaatgatacatataatatatctaaaaatagtctccctcttttatcttatggagaagccaagtttagtaaagatgcaatggatatgatagtaaataattttatgaatagtaataatttaaaaactcaagatgactataataaatataaagaaatgcttttaaataatgagaataatgaagttacagttgttatagatgcatctaatatcgtgttacagacaaatcatatttctgatgaagaaatagatcgtgctaaaaaacatctaatttctaatcatgatttttatgaatctaaaaaattatgtgatgtgtgtggtaaaagatctaataatgtatctgaaagaaatgaatttggtagatttaagattcattatttctgtgatgatcatagagttaaggaattatataagaataaaagtataataaataaccaaattatatcatataatggaaaaaataaaattaatcttggagctaaacctacatgtgatgtatgtaaaggaagtttatccacctttatatacactgatcaattttatttattatatgatgatacaaaattatgcaataattgtgttcatagctatataggaagaaatttattaaatcaacatggacatagatgtgaaaactgtcgtggacaaggatatattagggattacaaactctataaagtagtttgtgcttattgtcaaggaacaggttggattaagaaggagaacagtaaatgagggatttacatttaattaaatggtcattagcgggaatgattagatttgaggatttatgttttcctcaatttgataaaacttatgaaattatttttactgatggttatgtagaattagtttttgaacgaaaaaataattttattacatttaaagtacctgttggaattaaatatgggaagccttatctttctaatgaattaaaaaaagaaatacaagaaagaactattacttattattataaatatgttaattgtctaaaaagagatgaatatttagattataggaataaatatctacaaaataaaaataataaagtagctattttaagagattctaaaaagttaaaagtatatgctaattacgaaatatctgagaaagagtttctaaatattaggcgagaaagagtgaagattaaggattttctcaaggagaatatatgtgaagtttgtggttcaagaaacttattaactagattcaatagacacaatttatgtaataaacattcaatacaagttgaatttaaagaatatcatagtttagatgatttaataaaggaaaataataaattaaaatgccattgctgtaatgaagatattttaaaaactgatctttatatgaaacaagataaagaagcgaaagaaaatatcgcatcgccaatattcactatatttcataatacggatccactggataaagatttatattattgtgatcaatgtaaaagaaagtttaatgataaaatagttgaaaatattgttaaacggtcagaaatatgcaaatgtaaggagtgtaatggaaaaggttacgaaagaaattattatgtagaaaaagaattctgtgaaaaatgtaatggtaaaggatgggttaagaagaagggagtaaataatgaagtacaataatactttagatagatggagacatttaattatttgggattttgaagatgttatgaaatttgattcaaaaataccaaagagtattaaatataatcatcaagacactgacttaataattctgtatgaagtagttctagcggaagagtatattgagtttatctataaaaccaatgataaatttagattatcaaaaattattccacctattaagaataataaaataaaatatacagaggatttctatgatagaatgttagcatgtactcatcctttttatactgttcctaatactaaaatattgatcaaagatgaatatgataaatatagattagaacttatgaataatttaaaaaataaagttatattattatcatataactcagaaaggatgaaagtatatacaaattataaactatcaggattggaggagatttaagatcagttagaaaaatatatagttataatgaaatataatatcttaaaacgaatagatgatgataaattaatcattagttatgatattacacaactaatgattagtgagaataatcatatttaaaaatacatgtaaaggatgatgaaaatggcaattattaagaaagattatgaaactattcaaactgaaaatgctacagaatattatgatgaggttttaaaggaacgtgctattccagatcctcgtgatggattaaaacctattcaccgcagaattctatggggtatgcatgtacataaatgggaatcaaataaaccgcatgttaagtcagcaaaaattacggggagcattattggtaaacagtagtttcattgcctatcaattatgatagagtatataacttagcaatgaaattcttgccgtcttaagtggtaacatttaagattattaatgggggattaagctgggagggtttagttatcctgatcagagtccgaaggataaatgtaataatttattcaggcgcaacgcatagattgctgaaacttcacaagatgaagaatataatgtatccacgagaccccattaaccgtctattgtgaaatacatggttaaaaagatatgctatgctgagttggaaatgaccaactgatgaaaatgagggaaacctccagagcataggataaaaagcctatggttaataactaacaggaatatcatccccacggaaatgcaagcgtatatgaagcactagtaaaaatgtatcaaccttggtatgtcaataaaagccttattgatgctcatggtaagtaaaatcctttaatattatatgaataccgtcatataatagattaggctcgttaaaggatatgccgttttgtatggtaacatacatcattattactgggggattaagctgggagggtatagcctatcctgatcagagtccgaaggatggatgtaatagtccattcaggcgcaacgcatagattgctgaaacttcacaagatgaagaatataatgtatccaagagaccccagtatccatctattgtgaaatacatggataaaaagatatgctatactggattggaaatgaccaatcgatgaaaatgagggaaacctccagagcataggataaaaagcctatggttaataactattagaactttggaagtgtgtatggggatccagccgccgctgaacgttatagtgaagctagaatccataaatttgcagaagaggttttactttcaaatattaataaaaacattgttgattttgttccaaactttgataatactttagaagagccaaaagtattaccttctattcttccaatgatattagttaatggtagtctcggtattgccgctggttatgcaaccaaccaacatccacataatattaatgaagttattgatgagactattaagtatattaaagataataactatcaaatcaagctactaccagattacccaactggtggagtaattattaataaaaggcaagtagaagaagcatatactactggtaaatcaaaggctattattagagcaagaattaccaaaaatgaaaagaaacatgaattagttattagtgagattccatatctaaaaacatctgataaactaattgaatctattcaaaatgtagctaatgatagaattgagaaaggtaataagattcctaagaagattgaaggaattaagaatattaaaaacctttcagagaaaggtaaaattaatattattattgaagtaaagaaaggttatgagctagatttaattgaaaatcaattatataaatatactaattgtcaatttactctaccaatggactttaatggagtaatagacaagaagtttattaactttactaacgtcaaccaaattgttgcagaatggttaaatttccgtattgttactcttagacgtttatttacaaatgatcttaaagatgctaagaagagaattcatattattgatggattacttactgcgttaggtactaatctagatcgtttgttagatattatcagaactagtaaaagtagatcgcaaatggttgaaactattgtaaaagaatttaaaattgaagaagatcaagctgaatatattgtaaatatgaaattatatcgtattaacaatattgaaattgatcaattgaaaaaagaaagaaaagacttagaaaagaaatataacgatacggtattatactttaaagatgataataagattaatgagtatattatctctgaacttgaaaatgctaagaaaaagtttggttgtgaacgaaaaacaactgttctagatttaaatatagaagatattaataataaagaaaatcttattattgacagtaaccatactttcatttgtactaatcgttatattaagaaattaaataatactatcaaagttcaaaaacgtggtggtaaaggaaatagtattggtaagattaaatctgatgataatccaattactatttttaatgcaaataataaggataatattcttatttttacgaatgcaggaaaagtttattcaagaaaagcttatgagattgaaggttgtgaaatccaatcatatggctataatctaaatagtattattaaagatgaaactctaacaaatgtccttgcaatgacagatgatgagatgaataatgaaaatatcaaaattgcaattggtactagattgaataaaattaaactagtggatgtagcagaatttaagaatatttatcaatcaggtattattgcaactaaattaaatgatggtgatagtgttatctttgctcaaaaagtagatatgaaaggaaagaattctattattgcttgcactaatacaggagcaacaattaatatgtcacttgactctatcccagtagttcttcgccctacatttggttctaatatttttgataattctattattaataaaggagattatattgctggtattgatctagtaacagaagaagtatcacatgctttctttattagtaaaaaaggattgggaaaacgagttgaaatctctgagttccctgaacaaatccgtggtggtaaaggtcgaattggaattagagcaaaagaaaatgatgaaattgtgagaattgtttctgttaaaccggattctgatttaaccattattagtaatactagtattattggaatggacattgatgaagtaagtgtattactccgtccagcatttggtaacactattaagaaattaaataaagatgagattattttgggagcaaccgctatttaattagagaagactattagtcttctcttttattatattggagggaaattaatatatgtatataagtacgcttaaaaaaggtcaaacgaaggataaatgggggaaactaaaatgattcaaaaattaattagtggagacttcttaaataaaaaattggtatctatctcaaatattcaaccgtataatgttcttaatgaatatcttgatagagagagcatttatgacgattatcctgtggtaagaaataaaggtgaaattggttttactgtaaaagaaagtgtcacatttaaatttgagaatgatgtatgcttaaatgtatttgccttttcaagtgatgatccaaaaatggattatagtgtaactgactataatgaaaatgatattagcattaattcactaattggtaagaaaattaagacatttagacaaattggggaacaggaatttattcttatttttgaagataaattagaggtttatgtgggaattgatgatggtattttaaattgggaaattactaaagatggttcttactttatagaaagagataaagatttgcttgttgctaattaaacgtattaaaatgattaactaaacatatattatcttcctgatattaacgaaatattaggaggataatatatgaaaaattttgagagtttctttgtaaagatattactattagtttcaacattctttttgtctatttttgcatattattatatggattctggaaaagagcttattacagtattacttatatatctcccatttgcttttgcagttttatggtctgaaatagtaaattattataaagataaaaataataaaccgtattaaactacctaagcaaatatatattataatcttgatatagttaaaataaagggagagatatataatgattgaaagtttacagagaaaatttaaatggttcaaaataataatgactattagtaccattattggactatttatagtattgggaattctatttagatttgtattggcaatattattttctaaattattttggttggctttgattattggattcttagtatatgtgattactaaaagtaaaaaataaaagttatataaaggagaatgaataaaatgaactcaagtaattatgcagtagtaagagatttagaaaaagaagagattttgattgaagagagaaagacaaaaattgaaaatttcttgagtaacttatacaattatacattcttatcattaattgtaattacagttattatttgttcttggaagatgattgataaccataatatcaatgtgcaatttaatgatgcaaagaaagaagagattatagttcaaaatggggaaacattatggacaattgttgataaaactaatttccaaaatgatttagataaagaaactattatcagaaaaattagggaaataaataatatgtctactagtgatattgttgctggggaaactttagttattccagttaaataataaataaaatatgggagtgttgtactatgaagcaaacaatttttaacattcaggggcattcaagttatatagataatggggttaatattcctctttcctatgatggagattttggaggaaaggattttaatattcagctatttggtacagctctcaatattatattaaataaagattataattttatacaatacctagaatatattgaacatttttcagatgatattagtaaattctttaactcaaatttattaaatgatattaaatccgtagaattttcttggaaggataataaaattcgatttgaagtttctttagtaggtggaagagtttattattcaattggtttaaatggtgagtcatatggtttagagctagaagaagtaataacaggttaattagttaataatgagagcttatgctctcattatttttttttataaattaataatttgttcatcacttgcatttgacatgattttatttttaagatctcccaattttaaaaattgatgtactttctttaaattttctatttcaagacttccactatttatcattttattaattaattcaagttgcttttttatatcttttttctgttcaattgagatctctttattactagttaactcatgttccagttttttcttaattaataaaattctcttgtaggttgttgggtgcggttcgaaaaaataaaaaaatagatccaattgcatttcatataatgataaatagttaaggaatactttattatttgcatttttattctttttaaaatcagttaataacgatcctaatgaaaatccatatccatacatagtagcaaagctatctgaaaatctttcttgatcataatctttatcaagaaaattaaatgccaaattaataacattatctccgatactactattaaatatattattcttaatatcatttattttttcaatatgaggaaagaagtcagatatttttttattaatcatagttatttttgataaactcttatatgttagatcatttacttttatctttttttctaatgttacagcttttttaggagaaataagtgaaattgtaaagaataagactctataaaaatccctaattatagcagtgataatattttttaatattttatatttaatatcaccaccatctttttttattttgacaattttaaagagttgttttgtataatttaataatctatatagtcctgaaagtggataaattgaagctctaaaataattttttagatctaacatccttcttagataaaaaaattgatgtccaaattcatgtagaattgcagaaataattttctcctctgaactttcttttattaatcttgatgataaatgaagaactaattctttttttactttatccttaaatttatatccctcttttgtctttataacttcataatattctaagtccatatccttaaaactgttaaaatcaataaaagacataactccagcatataaatttttttcatctggtgtaataagaatatttacattttttatattaaataattcttcaaataatttttctatttctcttagtttattgcttttatttggattttttcctttcttcatcatattctttaaatcagttagatattcttcacatttaataagcttatcatttttcccaaaatatgattccaatattaaagtcttaaccatttaaaaacctccttaacgtttaatatcttattaaaatgtttcctaatatacatagtaaacattttattataaactgacaggaaaggaagaagttttatgaatcacactgtgataaaagataacttagaaaaagctattcatgttgctttatctgataaacataatactgacaaattaaatcatatagtcaaaaaatatatagatcacaataaccaaatattatatgcaaatgctccattacaacgactttatttctctgatactgatagaaatcatatttttgaattaacaggagtgaagaaaaattatattggggaaatcataaagaaagttgatatgattaaaagttcatggaaaattgttaataatccattcaatattctaatggcaatgattatcagacagtattctattgataagaaagaagagtcattaaataattctctcctttacctaactctttcgctttatagctcgctacattataagtactttcagtatattccgaatgagaatgttatgaattatacaattaataacttaaataataaatttttatttaaacagtatggtgtagtaattaaagcactatttcatacagctaataaaacgttagaaaaatatgaaaaagatttaaaaagaggtaatgatgaagatatagttaactttttaatgtttcttcagacacgtttaaataacttaatgaaaaattttactagcgaatatatgaagaattataagagtaaaaagtatttgaatactgaaaaggataatacagatgaagataatttttatgaaactgataatgtttcattaatgatatctcgtctaactagtcaaacgactaataagttttattcaggagatttaaatgataagctaattagagtttcatctaaatttagtgatgtaagtcctatcacacttaaatatgctttagaaagtattaaaaagaatgagcgagaaaaagttgaaagccttattcaatctatcctacaagtatatttgattgatggaaagaatagttatgaaagtatagcttctcagaggtttattgcatattgtatttctatatactctaagagtaatacaaaagatgttaacattctaagaattaaaaaattacttgattatttccttaagaataatagtaataaatatagtgaaacagaaagagaagctactagaatcagttatagaaaagcattttatatgtatattgtattatttatccagcaaaatcaattaaaacactaaaaagtaattactgtcaatctaatttgacagtaattacttatttctcttgaacattactatataaattaataaaggagttgaggaatatgccaagtaatacagctaagggatgggaagaccaattatcatgggatgattcaacaagtacagatggtggttcttcctctattacaattgcacctgaagaaccagtacaacttatcagagatccagaaacaaatcaagttactaaggtagtttatggaaacatgtctcggatgatggaaggagaacctgttgtcatgtggtcagaagaaattcttcgtgatgaggaaactggtcaagtaattggtattagaactgttagacctaatggaacctctacagttgaaactattcttcgtgatgaaaatggcatgtttcttggtacagaattgaaatatgaatagaggtgatataagttgggtttaccaagtttaattataaactttgaagagattaaggatccaattattagagctattaatgaagcagcaatttcagtatcagttggtgatgtaactctagattcttcttctattacaattgatacaactgaaattgaaaagtctttagatgatatcctatctaaattaggaactgttgatagtaatgttagattagttcaggatgctagtaaaaatattcttaatagtttaattgctcatgataataatcttaaaaattcaatggatcaattaggaactaaacttgacaatatattaagtacaactacgagtatgtttaatatattagaagaaattaagaaacaattggcaactgaaggaaatcaaagagctattggatactcacttgcagttccaagtgtagctggtagttacacaaaagtttttactagtgataaagatactattttaactgggataactatctctcaatcagcatggaataacaatgataaatggtctctaaaaattggtgattttattatgtttgatagaatttatactaaaaatcgtggagaacataaagaattaaagaaattctttccagtaccagctaatacaccagtgacctttcagtttgataatactagtagtgccaatagtaaatatgtatggtttgatattgactatattgaaattgataaacctacagtttgattaggaggtaacttaaatggggcttccttcttatataataaactataatgactctgcaaaatatattcaggaggctattagagatgctagattatctttatccataagtgacgttaatatggataaagtcactgaagctatattaaatacttcagtagttgaaggcaaattaagctcgatagttgatataaatgatgttattaatcagactatttctaatttatcatccgatattgaaaatatatctgacttcattattacaacaagtgaagaaaataaagaaataataaatcaaattgaaactaaattaaaatctcagttagatgttacaaaaagtattaaagatacagtatctggtatagctgataagctaagtccccaaggagaacaaagaattaaaggtttttatgaatatgttcctcctataagagaggattttatattagagtttatacagaatagggatattgaactaacagcaatttctatgtcccaaataggttggaaatatgaagatacctatgatttaatggttggtgaagatattatatttagtaatatctctacaaaagaagttgcccaaaaaaagaaatttaataaaggactaaaagtatctgctaatacttctataaaatttattcttcataataatagtggtaatagtagacagatgtggttagatatagagtatttaataaagccacagtaaggaggtttattcattaaatgggaatgccttctcatattattaatcgtgaagatctagaacaaataattattcaggctcttaattctaacagtttaaaagtcaatttaacaggtttaaaacttccagagacagttatttcaggaaatacagaaggtattgaaactgggatgaaatcaatattagatgtattgaatacacaatcccagaatgctcaagacttatttatgtctgtcagtaacttattagcaaatactaccatagttgaggacttatatattgacagattatatgatttgtcattattagtttcaaaattaattgctgaagaattagagataaatgaattattaaataaaataaaagattatttatctctaaaaggaattgataagtcagttagtatccgtaaagatattccaagtattaatggaacctactatttgaattgtaaagtttctgaagaatcaaatataactaaaattacaagttttcaaaatcaatatgatttttcagactgttgggatttaagagttaatggagtaactgtgtttgaaaatgttttttctaagggaattgaacaaagaaaatatttttcttcacctttaaaagttattcctactgatagagttgaattcttattttataataatagtggaaaacaaaaaactatatattatgatattgattttctcactattagctaatttcctagctaaataataccccattaatggaaggaggaagttactactattataatagtagtagcaaaaataatatggctttagtagattacaatcttagaagcaatgataagttctactacacagagggttctacttctgtcggtgatcttattaaaaatgtagccaatgaatttgttacaaaagctggaactgagtatgcatggacattagaatcaccatcagctatttctaatgtcacaaataaggtaatcctatctacaacaacttcatttggaaaaactttctatttaaaaatctttagaccagagactacagatgcaaataatgtagtttcagttccacttacttatgtaaatatggctattggtactgaatataacgctgaaactgaagatttagtagagggtaaagtatctccagtaactaaattatcttggtataaagatgatattgatccaagtattaaatcatggctaccagtatcatactggatgaatattacaaaagatgcagttaacttagtattccgtggagatccatctgctgataactatccatataagaaattcttagttggctatgcatatattggctcagttactcctttagaagacggtcaatcaccagacgtagaatacaactttggtattactacttcttcagcaactgaaccagtattgagtaatgcttatggtccaagaactggtacagggattactgatatcctaatggtagcaaataaaattggtatgccatatcagcctcattatccttcattctatggttctaaccaatttatggataaaatgaatattgaaggctcacgctggaataatcaaaaacatcaattctcagatattactgttactcactctattgacatggaacgtggtaaaatgcagaatattcttgttggtgataattcagctctttatgacaatgataaacttgtttataaagaaggtacaactgaacagttaacttataagaaattccagatttctgcaccttatagcttcttaaataacagttccaatacacaatattgtattgcaattagatgctacaatccagatggtatttcaaaagttgatgatggaactacagctactagctaattaataagggagaggatgtagactatgtttttgcaacgattctcatttaaaactggtctacctctatttgcccatagatttcgttatacatttaaggcttatattataaatggctcatcagttttcttaaaaattgatgagtctcctaaaaaaatagttaaaaataaaaatttatcaattcttaaatcaattcataatctctatttaaataaaaaagagttagtactagatttttttataaaagaattagataaatcgtcaaaatccactaaaaaattaattgcttttaataaattaatggataggaaaattgataaatatacagtagaaattcttaataaaaggatttatactgtagaaaaaaataacttaaatgtatataaaacgaactctttattggactatatagagatggataaaaataagttaagaaaagaatctcataatattagcactattaatagtatacatattaatggtactacatatgagatatatattcctaatgataatataagagtctcttctaaaatggagcaaattatttataatacaattgacacactattatcaaccaaatatagagatattgataaaagagaagattattttcaaattaataatgaatccatgaaaaagttagattataagatggatttaattgaactagataaaagtaataaaaatattattgatatttataattcaattaatactcttataaaagataaatataatatggattttaatttaaataatatagttcttgaaaataattccaataaatatattaatataaataatactgtctatgatatttataaaaattcaccatatcaaattaatagagataatcaaggtcactatctaaatacaattattataaaagatatcaataagaaccctaataactttggtctggttaaaagggttattagaagtggaaatactattaatactgttagtacacttaaaaaagatgaagataaaaatatttctagtatatttaatggatggaaatttataagaaaacaacctacatgggaaataagtaaagctgatagaagtctcaatctaaataaaaatttaattaaagatatatctttatctaataaagaattacactttaagaaaaaaactatacccgatatatcatttaagtttctaatttattcattatcagatatttccaatgttaatattgattataatactaaaaacttatttctaagtgtaatgtcaaggaaagacttatcattgaataaaaataatcattatttatatttgattgatcggagagatatttttattcttcctttatataattatcttaagaaaactagtaatcaaaacttatttattgattctaataataattttttaacaaaaaatagattaatatctattgaatctatgaatgacaatcaatatttatttgatgaaacttttaataatattattaataatttaaatatatccaaatattatagctctaatatagataaaaatataaataaaattaataaatctttaggtttaattaaatatcataaagatatgagtgattcaatcaataaagattttaatctaagaataagacaatcagaagttttatttaaatctttaccaagctataatatgattataagaagtgacgataattttatctttattcaaaatgatgaattcttaaatagtcttgataataaaattattggtacgaattatgttaagtatgatttacttaaagataatccaccaaatattattaagaattataattactcatcacttgatagattagcctatgctaatatagatgctgtaaaaaatatatttattaaagatatattaaatcctaatattgatattaatatagtaaagagacaattgaaattaattgagaataaaaaactcaataaatttaattatgacaattcagttaattttcttacattaaataaacgctggtggttcataaaaccaactaatccaaagacaagaataaatattccttcaattgattatccatatgaaactaaaccaataatggagttaaaagaacatccaattcaggcatttaaagacttaggaactaatgacatagatgtaagtattgaaatattacttgagttagttaatatagttatgcattggtggcatcattcttataatgaactttatagaggtttaggtgatgaatctattgttggtattatgaatgttttacatgaatggtggaatttagaatcctctcaatctcaagttaatgatgataaaactaataaagaatatgaacgagtttttagatggattagatgggaagctgaaaaagtatactttgatttcaagaaagactaccaaaacaatttaatatataacggtaatcattatatggagatacttacaaaaaatcttttagaatatgtagaatttcaccattatatgattgtacctctctataaatctttagaacgtatggatattatgagagcaattatggatgatgatccacaaggtgatattatggtggaacttcctaataaaaataaaggtgaaagagattatgttattgattctgaagataatagttatctcttataaataaggaggaaaaaaatatggcaacaactggaccaacttataaatcagtaggaagtactagttcttcttttaaacaacctagacaaaaaatgtggggagtttttagtcgtccaaattcacaagaaggggcaaaatattgggaacttactatattaactaatagtcttgaagaagctaaagagaaagttaatgattggttaaagaacccaccaactggtcaatatgctcaggcaggattgaataatatcattctctgtgaagttgttcctgttgatatggaagtaatttaactttaataggaggaaataattatgggtagatttgatccagttacttataaatcgctagctaataatgataacacttttaatagattacgacaaaaaacgtggggagtctttattgttagtgagtataaagaatctattggagaaccagttccaattaatgcatcatcaatgaaagatgattatacattgtttggaatcgaaagttcaaacatagcaaaaagagattattctattaaaggatataaaccagatgtagatattcctaaaactgggccagaaggtgaagaaattatatcaattactaacgtttctattcttaaagatggtgctgttcagttagggactaaaagaattcttaatggttcatattatgtagataataaaccttattatgctgatagtgatgtattatatgataatgtaaaaatatactactattattctaaggttaaagactattcatggaatcttgtattactaacaaaaagtcttcaagaagctaaagataaggttaatgattggttacgtttacctgaaattggtagtacttacccaattgctggaattaatagtgtaatgattactgaaattataccttctgatagtataattgagttgtagggagtgttattaatgtcatattctacagttgaatacaaagcagtttctactagtgaaagtatttttaaacaacctagacagaaaatgtggggagtatttgttgctgttagtaaatctgataatattaacaaatggaagttaatttatttagataatgatttcgaaggtgcaaaggacgtatttaatgattggttgcaaaacccacaagatccaaaacttgcaggcatggataatattattatgacagaagtacttcctgctaatagttctacaagaaattaaaaatgaatgtaatgggtgattatttcccattacattcattttattaaagaaagggatgttatttatgaatcttctaaaaataaaagatggaagattggaattagataatttctatacaaatagtaattttgcagattttttaaataaaggtggaactcatagagattttgaagataattctctttatattgatactaatgaaaaggtagaacgagtcttaaattataaaaactttctcattgaaattaagaaagagaattgggaagaattaaatgaagatgaaaagtttacattctatattggtgattcagtaaatgagtatgggattagtgaagataaagatgatccaattcaaaaacagtttcaaaagattatttattcagaaggatatgttcaatgctatgtatcagatgatggaatatcatggcagaatttaggaggagttaataatttaggggaaaatattactaaacagggatttcaaaaaataagtacaaaaagtctaaaattattacactatgcagtttatactgatccatttttgactattcagaattttccagaaggttacattgctaagttatatgatgagaataataatttaattaaagagagattatttgataagaataatgaagtcaaaatattcttagattataatattactggttatatagtgatttatgatttagaaaataatgaagtaacacgaacaaatcaaatggaattttcatatggtaacacctttattgcttgtgattataaattagaaatgatttataaagatcaattgctttcaaatgaggaagtcactgagattgatacttatggttctcctcagttagtcacattaagaaatatttcagatagtcagacatataataatttaactattacaactgaaactcttagtgatgatttaattgaattaagcttagataatattacttttagtgagtctattacaatacctgatattcttccaaatgaggaaattgatatttatattagtattaatcggggagaaaagacacctacattctcttatagagaatttctatttaaagttctttaataataatacgactaatatgtttttaaaatatatattataaacttgatatagaatattaaaaacatattagtcttttaaggaggtattttttaaaaaagttatgaaaaaagataacattttaaaggaaaacgaaaagttagaaatttgatgtcagagatgtggaaatctaggagctaaaaggaggagaactaatacaaattatatggaagaagataggaactttgttatagaatgtaataattgttttacattaactgaagagtattgggaaggacaatgggagatttataactcacttagaggttaaaaggagatgtttcatttgggagcaagagcaattaaaaaagaaaaatataatgagagcgttagaaaatcatttagaagccatttaaatagtttatttgaaagtggatttaaaaaagatccagaaaatttagaatcacttaaatttgcaattcatattgaggatttaatactaaagagtaatttttatattgagtattatgttccaaataagggttctaataaaggtcaaattatgagagcagatgacattttgaataagaagaagggaatggtacaagatattactatacttgaaaaatatggtcatcttgtttcagatgatttaagttttaaaagaattaataaatacaattatggaaaaattgcatttaataccaatacttatgatattggtattattagaggatactatgatgacaacactaaaacaagaaagcgttataaagttgattattgtaatattggggaaaatttaacaattaaaacaagtgattggaacgaagaatactgtaaagtttataatagtaaagatgaaatgattataggtgttgaggaagaactatcaatgcatccagaaattaataaagtactagaacacttagattttaaaatgggaatcttaaaatatagaggaaaataaaaattaggagatgacaactatgaaaaaacttcttattctaacaattctgattacattactaattccatttaatactattgaagcaaaatctaaagttaatgctccttttgcaacagttatggacactacattaatatttaacgatccaaaaggaaaatctaatcaaagtacagaatttgttttatatgtaaagaacaaaggtaaatatgaagaatatgaatcaattgagacatattatggggaatcttataattttattaatgttagaagaaacggtcagtatgctatatctattagaaaaaatggcagagaaagtagtctgaaaaaatttaatgtatctaaatcaagagaaaaggtaaaactaagtggaaatatatttgatacaagaagagtatattctcctttgcatgttcttattgatagaaaaggtaactttcaagttggttttaataaaaaagtatcaaataaaaaagttaaaattaaaatgtatacacttgaaaagaatggaaaaagaaaatatagaggatctaaaagtataaaaggtaataaacctcatagaattgatgctaaatttaataaaattaagaagtcaagaaattttatctttacttatacgattggtaaaaaggaaagcgaatatacattcttaacatttgataaagaagggaagtatattgatgaagaatttgtttctaaaaaaggaaagagataaatgagtgctaataataataataatactgttaaatttctcaataaaatcatggttatattattagtgattggaggactgatttttacggtactctttattactagctttattagtgatgaaagttattcatttgtatctaccctccttattgattggttgggtgtgatttgtttaattgctacatatagcacaatcttttattatatcacattgaaataataaaagaaaaagtgattgataatggtagaaaataaccaaactttgaggtattagtagagaattacacattaagcgcagggagagaggggtgttttaggatggcatacacattaatggggtactttcctgtactaagaagaaagatgaatgcagaatttaagcgggtagggttcaagaatatcaaggaaaaacgttggtttttcaacaaagttcttggaaaaactccatatttaaacgacatgactattgcggagatggaacaggttatttttgagttacaaaagtacaataacgtaaatgaaatttaaagaaggtcaacaagttgttaaataagactataccataaattggtatagtcttattttttttttttaataatgaactttaactaaatcatttttaataattaaagtaagatcatcttttgtaaatgtataattattctttttatctagttctagattttcccaccaactaccagtaagaaccttagagattttttgtgtatttagatcaattgtttgagacataatagattttttagtgacatcaagaacattattcaatgattccattttttctttttcagtaatattatcgttatttacaattgcttcacaaaatttaattgtatttttcataacttcagcaggtgcatttttctttttatcatttagaacatcttcaacttttggaagagacgaccatcctttaagtgtaaattccaataaacggctcatataaaagtcattagactctactacttcccttccaataccctgatattctaatctagagtttaatccatgtgcttctaatactttaatttgatcagcattaaattttgcaaactgttccgtttttttcatgttatacgatttatttttaaattcattgatataatatttaattactttttgtttagctttaagaacattaatatcaaaaacaatatttaaaataatttctggatcgttattattggcatacattctattaataattggaagagactctaaattgaaagtaacatcaatactatttactgttttttgcccatcttcttcattccaattagcgtctaaatgtaaaattaacttatcaaagtcaataacaccttcttgatgaagagctaatagtttatcatatgtgtctttatcaatacgaacagtaattttatttacattaagattaccatctttaataatagtttgagttctatagatacaagaatcaatctcttttggaagttttacacgtttagcttctaatggattaatagaaacttttccattaattttataacggacactgatatttaagtgtttagaattgaaaattaattcattcataggtgctagtggtttttcatcacttttcttaaatacattaaaggtatcagttacctttttaccaattcgattatattcactactatctaatggaatgtaatagttattaccagatgttagtacttttaataaatccataacacaaaaagcatcttctttagggagataatcctcttcagcccttccatctttaaagcgtgttttattgacaaaaatagctttattgagttctttcatgtattcttgacgagaatcagcagtaaaagcctccatgtgtttatcaataaagtacttatcaccaatactcatatgcataatgtcaagtgattcatcagccttaccagcataatacaattcatatgctaaagcatatttaaaattagcttcagtagtaactggaattttagatttaatcgaatcaatattaataacttcatcatttactttaatttctttagcatcagtgataataaagaattggtttttaatcttattcaagaaatctagatgcattcttgcttcttcagaatacttagtatttttattacttaggtataaaattcttgaattttcatcagcttcaatagtaaccttctcagataccatatcgcttaaaatctggtagttatggctaaaaatatcatcatagtcattaattttactagagtgaattaaacgaccaaacatagtttgggcggacatttcttctagtaaagctctattatagtagtttccatatccgatagtattcaaagccataatatcatctttaatagaatcaattctttcccaaattaattcatattcttttctttcattacttactacaggaacaccatcagtaaaaaaagtcacattaaaattaggacagagggcttttaagtcatcaataatttctttaacatgcaatagtgattcagaaaaacaagtagcaccaacaggtgatttaagagtatcgagtaaaatattaatatcttcagaatcacgttttgatttacctttaaacactgttttacattgaccttcactagagaaccagataactgaaattagatcattatcactcattaatcgtaatgtacctttaacattttcaattaattgtggtaaatcagtattcattgaccaagaccgatctaatacatggatatgatgcaatctatcaacttcaatactactttcttttacttcttctttagagtaattgatagcaatgacagttttttcagtatttcccaatttaatttgacttttatatgttttcatcatgttcctcctcaagattttcagttttacaattgagtgtttgaacttctcataaaaagttaggagaaaaccgtatcaaaatttttttataaatatatattataattgggataaatggtacaatttattcgaaaaggggagaaaaaattatggggagaatttttatggagagtgaacaagggattgtggaagtggaagaaaaaggaaatatttatgaattaactgaaatcatgaaggaaaaaggtagatcagtgaaacttaagaaaacacattttatggaaagagaagaattagtgaagtctacgaattttaatttagtatcaaatagcgttatcactaattttgaattacaatttctaattggagacagtgatattgtcaataggaaagatagtgatatagaattatttttccacaaaagattaaaagtattcctaacagagatgttagttgaaaaattaactaataatgaaattaaaggtgcaacatattcattctttggaaatatgggaaatgaacattttgtatcacatattgataaagttcaaatttttaaagatgaaaataaagtaaattttgttttctcaagtgtattagatggaaaaattaacagcctagatgttgatttacataaaatgaaaaatgaatttcatgttgataaattattcaatattatgaataatattattggtgaagatgttcatactattaatctaaattgtagttataacacgcttaataatagacgattatttagtgtaaatatgttacctctacttattggttataaaactagcactacacaaactgaaaattatctatgtaccttcacagtatttgacataaatctttggaaagagccattcatgatagataaagagctaggaagaaatatataaattatttaaatatgggagatgagtgaagaaatgacaccaatggaggaatatagaggattatgtaatagtgaaagcgttctaagtatttttgatagaaactataaatttagcgtttctagaaatattaaaggttttagcttcactgagtcaattagaaatccttatggcaacaataagatgaacatcggatccctttcacaagataaagaagacatcattaatgttatagattatagcagattagataaagaatataaattgtctaatcaagtggaatatgaattctttattaaagatgtaagaactattaataaagattttaaactttacaaaatattcttctataatgttattaaagaaatgatatgggagagaataaaggaaactcaaacatttgacggttacaaaatcccagataaccttgaaattaacttagttgatacagttaatttcatgagtattgacattccttcaagaatggtgaattttgatgaaattcattatagttatggtagatttaatgattctattagtattgattttgaatttgctaataaatatattgatttaaataaattgattaatttagttaattctggtattgaaaataaagagctaatagaaatagaaatgtctctacatgcacataggaactttaaagataatagagatgattatttatttgatctaccaatatttatgaattgccactcagatccaatagaccctagagattctaaggaggattggataacaacaatggctatatttagtaatgaactatgggatggaaattatgaaaattttataaaaaaataaaaggagggagtgagtacataccgtaccccactgtccttcttttttttattctgatttttcaaattcaattaaatcttttcccatttattaatctcgtttaaacttctaccttaaatatagttatttcttaaatatttcctatacttaatgtttcattcttttatttagctcttccacaactttttcaatatcactttcaaacttatatgaggttaagaatgcattaggagtaattctagatttttcattatattgaattaatacttggaataaattaagaagattattctttttcatttcttctagaacaatattattctcttcaataaaactaattttttcaacaatattaacactcattattcaaacctctccttctgatctctttatttgttaaatctaaaattgaattttgacgtttgatatattcttctacaatattaccaccaattgaatgatcaagaattcttctcttagcatcctcttggcaagctaagagagattcattatctagattcttaatactattgatataaaatgatatattcatattttccccctagagacgattatatttaagtgccattaatattgaagatttactagctttatagattttattatccactattaaattaagagcttcctcttttgtaaatgcttttacctctccaatttcacctttttgtggaataatatcatcaatagttgatctttttaatctagtaataaaagtaaaatcccttttatacttaatctgacctctctttaaataaaacttatcagtataatcaacaagttcaactgtataagtttgtatacctgccttaattccaaattcttcttctaactctcttaaagcacatctcattggtgattctcctttttcaagaccacctccaggaatagtccatttatattcttcttcaccatttgcaattttctcatgtacaaaatctggtaagtctgttcttgttcccaaaataattctatctttatcatctagtaaaataataccacaaccaatatctctaaaactactattgaccttcttgttaactgtgatatcttttactttctcaaagattgagatatcactatcttttctttttggaatcataattatatttctcctttttaaattattctttttaataatatatatttaatgacttatttaaataattctttttcttcacattaattggttatgtattttttataaataataaaagatatcattttatataacaacatgttatatatttgaatatcttttattattattattattttattaaataatatttttttttattaatccttccctaaaaacccctattattaattttgtttatttttttatttgcttaaaaaaattagagaatggaacattatattaaatttgatgggaaggattgagattagatcatgagcaataaaacttttgtcttagatacatcagtactgtgtcattaccctgaatcattattttcttttgaggataataagattgtaataacagaaacagttattgaagaattaagtaagcgtagaaaatcaagtgatgaatcaggaaaaaatgctcgtgatgctattagatatattaatgaactgagtaagcaaggcaatattactgaaggtatagatatggataatgagggtattattgtcattgaaactaattatgctgatattgaaatgccaaatggctggaataaaaatgataatgataataaaatgcttcaagtctgtcaatatttaataaatcaaggtgaagatgtacattttgtaacaaaaagtcctttaagaagtcttaaggcaactattcttgaaattcaaaatgaagattttattactgatagagtcgaagatgaatattcaggtagacgagatatcttattaacagaagatgatctaaatttattcttctctgaaggcactatcgatacattaacaactgaaatgtatgatatagacggtaatattattgatcctagtatcttaacaaagaatgaatatattactataatgtcgaatacagatttaaatcaaacaggtttaggttactatacaaatggttatattaaaaagttaatttttggggaatataacccttatcaagtacaacctaaaaatgcggctcaaagatttgctattgatgcattaatgcaaactccaaaagaaacaccattggtaatactaaaaggtccagcaggaacagctaaaacttttctatcaattgcttcagcactagatacagtagttgatagacaagaatatagacggattttagtttgtagaccaaatgttttaatggaagaaacacttggattccttccgggagatgaaaatgaaaaaatagcaccattaatgcgccctattatggataatttagaagtattaattgatgaacaatcagtaataaataatctatttgaaacagaaactatcgttacccaagcagttggatacttacgaggaagatctattcctaatacttttattattatagatgaagcacaaaatgttacacctaaagcaatgaaaggtattctttctcgtgttggttatggtacaaaaattgttatttgtggagatactgatcagattgatcatccttatttaactaaaactgttaatggtttagcatatgcttctgataaaatgaaaggtagttcactttgtagacaaatcacttttaaaactgaagaaaatcaaagatctcctttagctcaagaagtaacagaacgattataagaaaaacaaggatttggtggttaattataccgctgaatccttgtttttcctattttttaacaaaacaatgcattataggaatctacaaatagaatgttgatataagggggattaaacttgagcagagagaaaattttaaaggagacattgcttcttaattcattattagaagcaaaagtaatatcaagggaaaatgttttattaaaaatcgaaaaaatggtaaatagtatgaacccgccacctaaaaaggttatttttagagcagtaaaagataaacaagataatttaatagatatagaagttgttgaaccgcaaagatatggaaaagagaaaacactaatgagcattcaaaatgtttttacaactgattcaattgaaaatactctaagtgatattgaggcatcttttaaacttgcaaatgagtttaaacctatatttaaaaaggcaactttaagaaaaaagaaaaataatactgaattctatttttcattccatgataacagacgtgtttacaatcttgagacagaaaagtgggagaaaatgataatgtaaatgaaataacagttaagtgattttaaacacttaactgttatttattaattatttcattttacctttcatatttaggagtggtttaaaattaactttaactgttttaattttaccatctttagatctatacaaagcgtatacagttctcatagaacctttagctgttggaccttcttctgtaataactacttgaccattaaaggttttgaagttttgagtagagatcttggtgagatttcctatagaaaatgtacttttcatactacttgaaaatactgcttttagttcttctgagtcttttaattcattaacactttttactggtgttaatcctttcttttgagccttagcatttgtttctttaagagcaatttcaatagcttttttaagatcaggcgctcctttacttacacgaattgcttcattaaacataaatgaagactcagctaattttaactgtttttcattcatatgaaaacctccaatatttgatataatatattgtttattgaagaagacaacaattaattataaactggataagtaggaggattattatgtcattttttaaaggtattcggaacatagaaagagttcaatatgatctagtgcaatattgtgacaaggaatttgttccaaaatttatagcaagtcaaaatattgatgaagataaattatacgatactattgattttagtttacagttagctgaaaaattacatttagattataatatgtgtttcactattgcagtaatgcatgattttggttatattgaggaagatgaaaataattttaatacattaatgagcataaaagcagatcaatttttattgagatattttgatggaagtcaaatggaaattattgagtctgcttgtaaagaacacgatggtacaagtagagaaacaggaatatttacatctttatattcaaaggttattgcagatgcagataggatgtcaatattaagaattgaagctatgattcgtcattattggaaattctattctagtcaaaaggcattttctaatacagatgagcgtcctaataaactaacagataaagaaatttttgataagatgtatagttttcttaaaaaagagtatggtacaattgtatcaaaaaataaattattgttagaagcatcaagagaaatgatgaaagatgaaatagagaattctaataaagtattaagctctgaagaagacacaaaaagaatggttctacatttagctacttatggggaaatccaaataaataatgatggaacgcttaccgtagaaaaaataactaaagagccaatcagtgaatcagatccttttgaattatttgaaaaaaatataaaagaatcagtagatgaacaactactagaagccgcaccaaagaatctatcaaagagacaaaaggtagaagatttaatatataaggtactttcagttttagatgatactggagctaacttgagaaaatataaagagttctttggtaaaatgaacgatgaacaatttgatagatatatgaaaaaattcctaaaagatgaagatgaaaatttttatcttgaaattttacctaataaaagtgaaccttcattaaagcaaattaaaaaagcactagatatcttaaaagtaccaactgatgaatatgtatatcttcgacatgatggtcataaaaatgatcctattagaactgcatataaagtacctgttggttatattacaattaagcgggtacaacagatcctaagtaaaaagaatacttattctcttgatattgcacaaagaaacatgaaatcgggttataattggctctccattatagcaatataatggcaaacactctccttaatttctgggatatcctaatttttaggacaatcagaagcgaatttgaataaaaacctaatattcaaaacgttcaacgactatccgaaagcaatcatacgattgtgagtagcggtgaaattccgcaataggagtacggctcaagctattggagtgggtgagaatcccttaaatggaaacaggaggtatccttaacggataaagatatagtctcgtctctatggtaacatagagcagttcataagagaacgcagtagatgtagcgagtctactggaagatacgcaagttacaggtaatgacaaaattgccagaatatctgatattgaatcatatagtcttgttgctataggagctgataatgctttaaaagaattccttggaccacgagctagattattggctcgtaatttccttaattgctggaaactccttagagcttattagaccacaacgtgactggtaacagtgagcgtgaaggttataagaactaataagattggacaatcagcagctaagcttttatataattctttaaaagagctgacaatgctaaaacaaaaatatatttaaatttagtgttggaggtaattaaattttatgcctagaagaaaaagcaatgaggaatttatgaatgaagttatagagttagtaggggaagaatatacatttttagagaagtatgtacgatcactgactaaaataaaggtaaagcataatatttgtaataatatatacatggttactcctaatgatttcctaaatggtggaaaaagatgtcctaaatgtactgttcaaaaaatggctgatcggtcaagaatgacaaatgaggaattcattaatagagtaaaaaaagtaactaaaaatgattatacctttctagaaaaatataatggtactaataacaatttaaaagtaattcataatatttgtggatataaatattgtgtatcacctaataatttcctaaatggtggaaaaagatgtcctaaatgtgctaataatattaaaagaacaaataaggaattcgttaatgaaattagcaaattagtaggagaagaatatacttttttagatgagtatataaatactgatacgcctataaaaattattcataatatttgtggtcataaatataaaacttcccctaaagagtttattcatagaaattctcgttgtccaaagtgtaattttcttaataatgaatctttcttttctaaagttataaaaaagacattaaatgaattaaatatttattttattcaagaatattctattagagagttgggtaaaggtaaaaaatttgatttttatatacctagtttaaacctattaatagagtatgatggtagccaacatttctaccaaaaatttaatgataaaaatggtttcttgtcacagataaaaagagaccaagaaaagaatgattttataaaaaatagtgaatacactttgattagaataagttacaaaatcaataaaaacctagacataataattaaagaattaataaaagaaagttcaacgactatcgaaaaatataatctattattaattaataaaaataatgtagtaaattttaacaaatattacaagaatgctaatattaattattttgattatattaagtagagtaccctacaagctattggtagtatacttctgggatgaagtatagtatagaaaattttctatattgggaaacaggaaacttagaagatatagtctcaacttctatggaaacatagagcagttcattaatactattttaaatagtattatgagaacgcaatgagtgtagcgagctcattggaagataacttggataactctgtagcaaagacagatatgtataaaaatattaatttatatggatatacttatctaaaagatttaggtcatgatattactgaaaatcaaactcttaataccatgtatgtatatctaatgggtgctggattagggaatgatttattaaaagaggatactaatttagaagaactattagataaaaaaggaaagtgatattatggagaataaaagtaaaaacaatccccttgagataaaaggggattttgtttcattagcagaaaatttaaaatcatttttttctaaagaattaaaggaaaatattattattgataaagataatatgctattagaatatgattcaaattttgagaaagaatattcattcccctcaatcaaaattgtagaatccaataataaattagttgaaagtaaatttaaacaaatagaatctagactaaaagaaaattatcaatttactaattatgatctaaatatagatgaagataaatcaaataatataaagtatattagtcaccattacaatttaaaggaaaataaaaatgttatcttatctataaacatgattaaggataatacgagatatgataaaattattgagagtgttaatataagcctagtatttagtaatcctgttattactgaaactacgcatttgggaatcacaaaaactaatattttagaagaagatttgttaatggaatcagtatttaaaagaaataaatataataatgaattagagaatatggatcgaataatgcgaattaatagtatctctactgttaacttattaaatgtttttgatagtaaattggttagcatgttagaaagaagatttggaacttctttaaatggaaataaagaatattacactacttacaaaaaatcttatgaaaaggatcttttattaagacattttgtaggagaatataataaattagtaaacaacaaagcattgccaaagcatattagttttgctttctcaggactgttatataagggacaaatgtacccattgttaatttctattaataataatattaatagggtgattggagtttactgtttcttattaagtccagatactgaaaatgagggtgtttatcagataggaaaagctgaattataccactcaccagttgattcactagcaagtgatatattaaaagtacgtaaagttcttaagtgttcatattttggataaataaataatggaatatcatacggtttaacagccaaatatgatattccatttattaaacaaataattaatttccactaaactattattatgaaaggggtagaacatgagaaatgaagaacaagagagcaaaaagaactctaaatgtgttctctgttctagtatttgcatttttattattactcctaatgggaagtaattatgtcatcaatctagctaatactagttctgagaaaataagctctgctatagaaaatcagaaccgacagcatgctaggagtaatctcttatattttaatgataaattaacaagggattacgagaacggtaaattagatgttaccaatccaaaacaactagagaaatgggctactgataatttaagaacagtaaaatcagattcaacatttaataattttgctgtaattgaagttgaatatagcaaagcaagtaaagagtatattggtaattatatttggcgtgcatctccacaaaatattgataatggtctaggatatatgactacctatgatatcattattaatcaagagaaagccagagtcttcttttccaataataaagatattggtgggaaatatccatttatttcttataatttaattaagaattcctataaaggaaagatcagcgacttaattaaagaagaaatcattagatataaaaatccagatgaagtccaagataccttaaatgctatgtatgaaggatcagtaagtggcaacaatgataattacacttggaaatataataatggtaaagaaagctttattgaatggacaacagttcctttagaatctactattggactgaatgatgaaccaaaaaataaacgtggattaataaatcctaattataaaagaattattatagcatgttcagttgataaagattatgttaaccaaccatttaagaaacaaataacagatctagaacactttaaagagtgcgttttaataggagttagtttgtttgtatttctctctattggtttaattctctattttacttggctgatttgctacaataataaccacaaaaaataaaagaaaaggagcattgataaccatgcctaaccatactgatgacacaattgtcagaatcttatgggtggtagtgattagcttcttttccgcattcgccaaggaacttaatgatcgtgccaaaaaccctaaagaaacgtttctcttatttctgagtgaggttcttctaaacggtgtttgtggtgcgatcactggagttctagcatttaacctcacggataatatctatacaatatctgctatttccgcaatcggaggattaatgggaatgaacctcatcaaatacattactaagcttggcattgtttatgttgcggcattgagaaatataaacgtagatgatcttagtaaaattaatttagatgatgaaaagcctagcgaagaagaaaagaaagagaacactacagaagaaaaaagggaatcctaagataattaaagaagaatagtctaataactcactgttcttctttgaattatcatggcatgagttataatgcttcttttatgttttaattttattacttttgagttattattttaatataagaataaaattatactgtacagtataatttttcaattgcatttaattgtcattaccttaaatgaaatataagaatatattattaatttgtatattttattaaggaggatattaaatgtcatatattgaaatcgataaagaattttttattaataatattcagccagagtttgaaactgattcagaaattaatattcagggtagatctaaacttagatatggtgcatcaatgttagaattaaatccaaattcactagaatgggatgacttagaaaaaatatatgacattgctcagaataaaggcaataggtctgttatgatgcaagtttcagcgatcaagaatttaatctctgactttgaaggagctaagatagctaatttaaaagcacttgcagttgcactaccttcatactttagtgataatttaattgacggatggatttattctttggatagaaaaaataatccagtcacagttgatccatacttaattacagatattcgctactatcctcctaaaaaggatgatccagcgtctgtttctattagattagttgctaattcacctcgtcaaagtagccgcgataaacgttatacacgtagtatctattttgatagtagtgatatcagagggaaaacaattcctcaaatactggcaaaagagaatctgtttcatgaaacagaggaactaaaaaatatctatctagaacaattagaattatttaataaatatcaacctcaaaaaacgaagcaatggttatatagacatagcaactaaaaatagatttatcaatgatgaaggaataattaaacgagtttttaatgaagagtatgatccttattactggagaaacgaagcaggagtggacaaaaaatttgatagaattccacaacattgctatatttttggttttaacttagatacacataaatatacatgggtacatgctactaatatgaaaccatatgaatacgacactggtctaagagataagctaatactccctcaacgacataaggatttaattgacattctagtaagtgatcttgatattcttaaagaagatataattgaaggtaaatctggtggaactactatattagctacaggcaaaccgggacttggtaagactctttcagcagaaatttattctgaagcaattgaaaaaccactatataaagttcattcagggcaattaggattgagctcaaaagatgttcaagaaaatctagaagtaatattaaagagagcttcacgttggggagcaattgtattattagatgaagctgatgtttttattagagaaagaggaaatgatttgcaacaaaatgctgtcgttgcaagcttcttaagaacactggaatactttgatggtattttatttatgacaactaacagggaatttgatgtagatgatgctattaaatcaagatgtattgctgttattagatatgaaacaccttctgaagaagatgctaaaaaaatatggaaagtattatctactcaattagaagtaaaccttagtgatgaattaattgatcagttagtgcttaagttcccagaagcatcaggacgtgatattaaagaactattaaaacttacatcaagatttgccaaaggaaaaaatgaagaaatctcattagaactgtttagacagtgtgctcaatttagagctattaaaatcaaatagaaggagttatgataatgggtaatattcttactgaaataaaagcatttgatactaattatatacaaaaaggtgatgctattaaaattatttcacctgaaattttctctaaattaggtgttaataataggaatgcgataatttccgaaattaaagataatggtcaggagctggtgtgcttttttgtatctgatacgtatgtaaatacttctccttttggtgttatctttaatggtgataattacaaaattttatcaattagaataaatgttaaagatgtagtcaataatatgattatggttgaaaaattaattcctgaagaagtttcacaatcaagtgagattttataatataaataaagaatgaaatagctaataatgctatttcattctttaaataactttaaaggagtaacataatggaaaatttatgggaaatgaatgatgaaatagaaactttaaaagattcagataataatgaatatctctatcatattactgataaaaacaatttagaaaaaataatgaaagatgggcttgatccaacatctaaaaaagtaacaataaatgaacagaatctaatttatcttacatcagactataattttataatcgaaaatgatgatgaattttggaggaataatttagtattattaaaagtaattattaatggaattaaagataatttagaaccagattatgagtatgatgtaggtttagacattaatggtaatccccacccaattaaagctgtaacttatgataaaaagattgattctaagagaatttcaattattggggaacttgaattatacccattagaaaatgtaccttttcctatgtatcatggaaaaatcaaaaataaaggggatatgtaaaatggcaaataactacacaggttacacaagtgaatttggtttgttattatattcaaataaaaaatataatagaaaaaatgtatttaaaagattaagatgtaaacatgatgtaattacaaaagatagatgggtagaagcaggtttctacccaacagattatagtatttattattgtgaaaaatgtggaaaaatcaaaaatattaaaaaatggagtggtgaaaagagaaaattaaaatttggtagaataagaagataaaataaaatatatttctccttcttatgtattctctttttaatagaaaaaatttagagaattcctaacaagtaattgaaaatcttgttatacatgagaggggaaattcttaatgtcaatcttaactgaaacaatgcgtaaaattattagtaaagaaaaaattggtgaagaaaatacttatactccttcctataggactggaattgatctttttgactatcgtaatggtcgtagagagagtggaactaaaaaaattggtgttgacggtggaaaggttcttacagttgtaggtaaatcaggtacaggtaaatcaactcttgctattgaatttgctagtagtattgttgaaccatataaagaaggtcaagtctatcatttagattttgaacgagcatcgactctgtctcgtattcaaactatcactggttggtcagatgagaagattaaagaaaaatggattctattgaatcgtggtatttatagtgaaagtttatatcaattggttaaatcactatctaaaattaaacttgaaaaatttgaagaattagctttggatacaaatgaagttgatttgcatggtaatgatgtaagagttcttcctccaacagttattcttcttgattcttgggctactcagatgcctcaaagtatttctgaagaagaaaaactatcaggttccatgtcagcaacatctattgctaagacaaataatgctattattaaacgtattatgggtgatcttgaacaagcaaatattatcctgattattattaaccatattactcaaaaaattgaaattaacccaatggctaaaacacaagctcaagttaactatttcaaacaagatgaatctattccagggggaacttcttgtatctatcttgctaatactcttttaaaacttgtttcttcaagtaaactagagccagataaagagtttggaattaaaggatttaaagtaaatggtgagttaattaaatcacgctctaatagtgctggaaataaatttgagatggtatttgaccaagaaaaaggttttgataatgttcttactaactatttactactaaaatctaatggtgttattggtggcgcaggtagaggattctatctcaatactcttccagatgtaaagttttctcaaaaaacagttaaagaaaagtatgaaactttaccagaatttaaagctgaatttgatcgtttagttgaagagattatggatgaattcctatccggtattgatctctcagaagataatgataatcttacattggaagaaaacattgaaggtaacatttggagagctagtgacggtcaatattataaatttgatgatgaaactgaggaagttgaattaattgaaaattatggaaaataatctcaagatgagaatagtgtaatttacactattctcattatctttttccaatttattttttagatatatattataaaaaagaattcccattgtctaaagggaatgaaaagtctatatcagacaaataaaaatttgctttttgttggaaaatatgttataataaaaggaggaaaacttaaatgaaagttgtaaaaagtatagtgaatgtagcaattcaaccagaaagtgtagattatatgaataatttattttcttgttatacagaagaaaatgatgttccacatcgtttaactattaataatccagttattcatatgtatccaaaagaagatacatatggtgaagatggaaaattatatggttttattgatgcattgagattcacagcagatatctatgaccccagagaagaaaatagtttatagggataatcggttaagagatgttatcaaaacaaatgatagtaaaattaaaaatatttcttacttcaaagatcttagtactatgatatcctttgatggtaaacatatattgcttccaaattatatagaattattggtggaaaaaatataaacataggagatatttatcatgttaatacaaccagttagtccaatcatacctatttataataataacttaaaagataaattcttaaaaaataaaaaaaatgagaaacaaaagaatgatttaatatttaaagatatcttagagaaatatattaaaaaaggggtattattatgaaactagaaaaatttaaaataccaagagttggaatgttatatgaatatgcaagatttgatagaaataatagtaataaaaaatatagtgagataaaattagttaatactttatataaaacagataatgaaattttaaaggatataccttttgaagagctaggttttaaaggtagttattataattgcgagattgctgagtatttagactcttatgatttttctatgtttaaaaatatatttaattatgatgaagagacagttaattatattaaagaagttggaaaaggatataatgaatttattgtaataaatgatttaagagatgagtttatttttgttaaatattgtgaagttcttatagtaggtgactgcgcttatccacttcctacagacaattgttattggttaggtggcgctaaagtagtagattgtccttcagaggactattaattagatacatacaactaggaggaatataaatggatgacatcagtgtaattaagaatgaagattatgaaggttcacatagatttttagcagaggaattactaatgcctaatgcaaataaaacagatggtaatagatctacaatgttctgctctcacttagcacaggcagtaactctacaaaaggctgaaccgccattagtctatactaactttgagaatcaagttggaaagtattcaactgcaggttatagaaaggctaatagtaattataaggttattgaaaaaatttataagaatgattataattatgtacttattgtacaagatcaggaaactggggaatatacactatttgaaagagctgaatgtgagtttttaactgaacattatggttttcaatgggataatgataaaattgattcattaaagaaagatgatacaattgaaaaagatactgtattatataagaatacctgttatgatgaaaatatgaattttggttatggtgttaatttaaatgctgcatattttagttataagaatgaaacattagaggatgctattgtaatctctgaaagtgccgctaaaaagctaggaacatatagtgttaacaaagtaaaagtatctgtcaatacaaatgatatcttgcttaacctatatggtgataatgagaactataaaggattcccagatattggagaacatattaaaaatcagattattgctagccgtagaagatttgattataacactgcattatatgaattaaagaatctaaatgaaatgagagattcagatactccattctttgctgatggtaagattgtagatattgaaattttctctaatgtacctgaagaagaattaaaagtacagaagtataatgaacaagttctatactatattaataaacaaaaagaattttctaataatgtttatcaaaaacttaaaaagattgtagaagataaagatagtaacatttcagacaagctattgcacttctataataattgtaaaatgagaattgatgaaaatatttcttacacttatcagaatagtaagtttagtggttttattatggaattcacaattttagaggaagaaccattaaataaaggaagtaagattacaggtagatatggtaataaaggtgtaattagtaaaatactccctgatgatcaaatgcctactgtggctgaaggacgttttaaaggactcaaggcagacatttgtcttaatcctcttggtgtatttaatcgtttaaatttaggcgatttaaaactctcttaattgctggaaactccttagagcttattagaccacaacgtaatcggtgacgataagcgtgaaggtttgaaaactaataagattggacaatcagcagttattaggcttaatttttaaaaatcctccacaattaaatgaacaaataaatatgaattattcattttaggggggattttatgaaaagaaaaatttataatgaggatattatttctaaagaagttagtataattaatcctgaatatgaatatgttaaattaataaaactaaaaggtgttcattcaaaaatattgatcaatcataaaacatgtggtagaaatattgaaattattttcaataactttaaaaatggtagaatctgtaaatattgtagtaagaattgtatagatgagaaatcttttagagaattagtcaaagaagataccgactatatttttgaatcatttatttcaatgaataaaaaaatgactgtaacacataaaaaatgcagatatgtctatgaagtaagaccatcagattttgtctataataaacataggtgtccaaattgttccaatcgtatagcatatactgaaaaaactttaagtaaaaaaataaaaagcattgattcagaatatgagatgatagaaacaattgatggctctggagtaagatcaaaaataaaattaaatcataagaaatgcaataaatcctttcaacttattgcaagaaactttttgattaataatcaaagatgtccatattgttatagtaaaaggatgtttaatccgtcatttgattctaaaggaattaaaaagataaaagaatggctggataaagaaggatttaaatatgaaactgaaaaaacttatgatgatttgatttctccattctcaaataagaaattaagatttgatatttttctaccacatttaaatacactgattgaatttgatggaaaattccatttcaagtatagtaactctagtaaaatattctccaaagaaaatttagaaaaaactaaaattagagatgaagtcaagaatcaatattgtaaagaaaataatataacacttttaaggattagttatactgataatattcattataaattagataaacattttaagtctaataattcaacgactatcgaaaccactctagcagatcatagttagaaggaagggagtagagtacagccaagcggtagaggtattccgtaataaggttataattcctctttaaatggaaacagagagttaatgaagatatagtctcatctctatagagatatagagcagttcataagagaacggcatgaaagtagcgacttcatgtgaagacaatgtgaatccaagtcagttaatagaacaagaattaaactggattgctaaattcattagaaaagatatggaagaagcaggaagtaatgaagaaaaagttagcatcttacttgatttcttaaatagagtgaataaagaagaaactgaattaatggaagaattcattaatagtctaaataaaacagaattagaagagtttctaaatgatattattgaaaatggaattcctatctgtcaaaagccattcttcggtaatattggtttagatgaactttgggaattatatgatcattataaccatattgattactttaaatgtgagggaattagtactcctttaattattggagaaatttatatggttagattaaaacatgagccacattctaaatttagtgctcgtagtacatcatttatgaacctaagaggtctaccagctaaatctaagaattttaaagagcataaagatttatattcaaaaacacctgtacgtattggtaatatggagatttctaacttaagtcttactaatgaaatgggttctattatggatatgctaaattcatactctaataatgagactaatagaagagaacttattatgcaattattaactggaaatccatttgataccaatattgatctttcagatgtagagtcaggtacaagtaagattcttaaatctttattcacatgtctcggtctttctattgatgatgtagaagaagaatgggaaaataaactaaatggaaaagtagaggatgaaaaataatgggagtgaatgaaatagaaaaagaaattagatgggttgctgataatactatctttacccattttacttttggtattcgtaattttaagaagattctagaagctgttttaattaagttagatggtcaatatgacacaaaattagttcaaaatataactagagaaatttcataataagagacgtataatagatgtgtgccagtttcacatctattatacgctattaaaattacaggaggacattattaatatgtttatttcctgtaataaaaaagacacaattttgagaggaagagatattttatggggaatgtagtagaatttaaaagaaaaacagaaaatgaagaagtaaccgtagaagaaattcaattagaatatgttaaaaagaaaattttagatacatatgaattaaaagaagaagatattatggaagtcgatgaaatggttaaagtatatttagaacatctagagaaaggagaggtaatggtcttctcaagtagtgaagatgctttatcatttgctaatattgtaattaatcatccagaatttaaagatatttcacattttaaagttactcctaatatttcacgactttcaatgttttatgaactagaacctgtaatgaagaattctaataaaaagtatatctttccatcagaagataaatttgttccatctattcactatagaaatatcaatgaaattttataatattacatgaactaggaagggttcacattaatatttattagaaatcattacacttatattctttaaaataggaggaagaaaaatgttgagaaagaaggtatcctttatatgctgtacaaagattatttcattatgaagaaataattgaaagacgagataatactattaaagaactaaaattaaaaattaagagattagaggagaattaaattatgggaaaagaagtaacatttgagatagtaaaagaattaggagtactttcagaaggtaaaaatggttggacaaagcaggttaatattattaaatggaataatggaaaacctaaattagatattcgggattggaatgaagaccgaagcaagatgggtaaaggaattacattaaattatgatgatgttcaattattatttgacattttagaagattgtaaagatgatattgatatctaattgatatcaatatctcttattacaaaattaggaggataatttaaaatggaaaaacaatattttttagaattcgttcacaacactattaaagaaaatcctgattggttgggagagacagttctttatatgcaggatggtcttaaaagatcattagaagaagaaagacaaaaaagaaatgatgctgaatatgcattagtaatggcatatgatatgttaagcgagaaaaaattaaatagccgcccagccaatcatattgctattaagaaagtattaaaaaatagttctgcttttcaaggtactgcttttgtagaagaattagatgtataatataggaaataatttcaatataaatgaaatatagcaacaaaaaattttaaaggaggaatcaacattggataaacttaaaattcagaaattcattataagtcttaaacaaaagaaaaatttgagtgcagaaaaattagaagaggtcaaatcatttctagataaggcttcagaagcctattataacactgggcaagaaatcttatctgatgatgaatttgatgccattgccagagaatttaaacgtttaggtggtaaattagatgtaggtgctaatccacctaaaggaaaaggaacagtagatgtatctcatacatttgctgagttagttggtacattagataaaacaaattttatttatgaaaagaacgttgatgatccaagcaagaagagtgtagaagaatggctaaacaatattatcaaaaagttagggaatgataaagaatttagtctaggtatcagttttaaatttgatggtaattcggttgttattgaatataaagatggaaaagtagttagagcattaacaagaggtagaaatggtctaggaatggatttaactcatgtctttaaagatcataatattaaaagaaaagatcatgtaggaatcaaatatgaaatcattattccttggaaacgttatgaagacttaatgaaagatactggtgtatcatatgctaatcctagatcattagtatctggtaaattaggtgacgataatgcttatgagtattataaatatatggaattagttccattatgggtaaaaccttacaattcaacaatggaaagaactgaacagctagaatttattgaagaagcatttggggaagataatagtttattcagtgattatagattgattgaaggagtaacaggaaataatttaactccttttatggaagaattagaagatatgtatgaaaaatataatattgaaagatataatcttccatttatgatagatggtttagttattgaagtattagaggaagatattagaaatacattagggtatgtaaatgatgaacctaactgggcgactgctttaaaattcccttatatggaaaaaactactactgtaactgattttgattttacattaggtgactcaggaattattactgcaagagtctggtatgaaccagtaacttttaatggaactgaacaccgaaaacaatctcttcagaactataagagatttaaagagttgggtttaggaattggtagtcaaatcttggttcaatatcgtaaataaattgcgattcatatcagtaatgatatgtctaaactctcttaattgctgggacacccttagagcctattaaactaaaacgtaactggtaacggtaagcgtgaatgttttaaaaattaataggattgggcaatcagcagctgtcaaacattaatggacgaaattttttattggaatatgacggacattatcataaaactggttggaaaggaaatcctaaaagtaaagaaatagtagaaaaacatgatatgaccaaaaatattttctgtctaaagaataatatttttctttatcgaattcaatcagacaaagaaacaaatgaacaaaaaatacttaatgagttaaatttaatgtttggtagttcaacgactatcgaaaatcttaaaaaagatgagtagagtaccccacaagcgattggtggcataattctggaatgaattatggtatggaatactccatattgggaaacagagagtaccctaagaagaattattaattaaattattagggtattgatatagtctcaactttagggaaacctaaagcagttcaaaaagaacggtatgaatctagcgaattcatatgaagtatattgaatgattgtcttacctatgttgttccaattttaaatgaacacaataaaaatatcgctcctcacccttatactgataaatgtccagtatgtgatggtgaagttgggattactaaaactggtgctttcgcctattgtaagaatgaaacatgtgaaggtaaaacagtaggtaaaattcagaactatttaactaagatggatattaaagggattaaagaatcaactattgtcaaacttcataatgcaggattagtaaaaagtatcactgatctttatacaatggattatggaaagattgctgaagtagacggtttaggagcaattgcttcaattaatattagtggtgctatcaatagtaaaattccatatgactatgaaattattggtgcattaggtattagtagtttttctacatccaaagctaaagaactttgtaaagtattttctgttcaagaaatgcttgatatacttgagtgttactatcctgaaaatctaattaacagtattactcaacaagaaggattttctgatattaccgctaactatattgtggaaggcttacaaaagaataaagaaactattgaatttttattaaaaagagaacacaaagtctttaaaacagaatatgaaaaaatggctggagtacaagctatgaaaattgtttttactaacttccgtgatgaagcaatgcaaattcaattagagatggctggtcataaaattacaagtgcagtctcaagaaaaactaatattgtcgtaacccctaatccaaacggaaatacagttaaattaaagaaagcaagagaatatggaattcgaattgtaagtgtagatgagtttaaagaagaaatgggaattagctaatataaaataaagagattctattatagaatctctttatttttttaatttaccatggatataatagcaccattaatggatgatacaaccttagatagagatgctagtattttagaattaagtttaattaattctgagtgaacatgaatggaacttgatccaatgagataacttaattcatagttatccattcttgaaattctttctttaattacagaaagattatcttttaattctttcattgttccttccacttcagcaatatttttataagataattttaagaatgttaatagtttatcaatatcttttgtagtataagatgaactactcttattatcaagtttttcaccaattgatcgacttaaaccatctaaagatacgtccatagatgttttaagaatactaaattgagaaggatcagtaatggtggacattcgattatgactatccattagttttttataataaggatcatctgaaaatgaactaatagtttttaatattttatctggatcaatttcaattgtaactttcttcccacttgtaaagtcactttcatgaatcttcttttccaattctgatgtctttttggctaatttagaagcaaatttcttaagctgtgtattaatccattcttttatcctctggatcagttcagacaattttttgatgatcttttttaatccattagataaaccttcattaagtaattcggtattctcattaattaagttattatgatgcttgataattaaatttttttcgtcaagattcatttcattaattaagttcattaagaaaatgttctcttcatttagactaataagaaagtcggttgttaagtccataactataaacctccaattttatactttttattaaattgttctaatagaaatataaatatatattattatactgatcaaattgtaaaggagagaattttaatgagtttatctgattctattggagctggaagagtaacaaaattggataaggatgaattaagaagagaacttgaaaaattctataatacttctaatcatcccaaaagagaaaaattatttgaacttgcttgggaatatggtcatgctcatggcagtcgtgaagtggatttttactatgatgatttaattgatcttattcgataaaaaggagagaataaagtgaaagaaaaaatcggtatacttttagagaagattaaagatatgaacattaattttaatcatggcggagtaaatctagttattaacgaagaaggatttaaattaaatgttgctaagaaggaacaaaagaaattagagaataaataattgggaaatgaaaaattagggaagaatattcttccctaatttgtttatactaatataaaaaggaggttaatgtatgtctattaaaagacaagatgtaattgaccaactatgggaaagaagatcaaatgattatgtacttaaagatgataaagaagaatttgagcttgatgaaatagtaaaagtaacacaccgtcatcaaatttttgaaaaagatcttcatgatgttgaatttaagttacagcatctacttgaaagaagtattacatgtcctatatgtcagcctaacactcagcatgaagctggtgtaaaagtcttaagagattattttaagaataaacttcaattggcagatgaagaaattcaggaaaaggctattgaaaccgataaaggacatgtattcgattttctaatatttgatcgtttagtaatacattattttgacccatcttattatataaactttacaagagaatcagatgaaatggtagatttaatggcagaatttgttgattcagatgattatgatttactcccagtaaactatgctaatattaccaatatcttagcagggggagatttagatttaaatccagatgaagatgatgaagaataacagaaggtttatttgaaccttctgttatatttatttaaaggagagaggattagatgattactaagagacagattgaaagagtattcaaagttgctctacaggaacaaggaaagaaaaatgattacataagagaaattgcaagaagttataaaggacattttaagacatttaacttttctgattttgaaaattttgcaaaaaatttggatgataaaatgtatgagagagcattcagaaaatttaaaaagaactttaaggatgatacactagagttatatcttccttttgataatatggaaattatatttaataatggagatggtttagttccgctaggtaagaaagaaagatatgagattattagaattttcattacaaaaattaaaggaactatttatattacttcacatattcttgataatgaagaaaagaaattatacaataattatattactttagaaaatggtattcttggagggattcatggtgaaggaatgttatctgataatttagcatcatttgatttatttgtaaatttaatggtatggttagattatatcaatggaagttacagtgtaaaaattattgacaataagagtcttccaagagaagagagaagacgtgttaaaagggaatatcaaaagacaagtggcactattaatttaaactcaaaagaattaattaaaagatatattagggaaaaagaatcaaataaaagaggtaataaaatcaccaagcaatttgaagtcagaggtcattgggtacaccgtaaagatggaactaaatattggagaagaggttatgtaaagggtaaacatttagaagaaaaaacaaataaagattataatattaactaggaggattaatatttgttaatcaatagttatgtattatttagagatatcattttaggaatgcaatctggttataatgtagtagaaataattataaattatattgcgggagaaaaatatggaaaaaccaattttggtacttctagaaggtgagtatcaccgtagaaagaatatattagtaactactaatgtaagaaaagttgcaagagaatatataaatttattattagaagatgattggttaaattatccacatgtagaaatatggaaaaacggagaagaaataaaatattttgatgaaagaattaaagacgaaaaaaagttagtaaagatattaagtaaatatgcatataacgatgcatagagttaaaaagtaatcatagtagatataagtctactatgattactttattttaaatttatttttttaaaggttcttgaaggtgctttttaagtgtatcaaaagttttaaatgaagctcggcgtgaagcaggaattgtcataggttcacgagtactagggttatgtccttcataagattcacgataagttacagtgaatttaccaagtttaggaatagaaacagttgtttcttgttctttgttaacttctttgtagatcaatcctacaaaagcattaaacatttcctcagcttgttttttagtaactcccgatacttcttctttaatatgttgtgcgatttgattgacattcattataatgtcctccttagaatttataatttttattttatcctaaatcaatatcttctaaacaagattctgattaagaatttttctataaatttgttctagaacccacatatattttttaattttttcgaaaaatatataggggagaactatagaaatttatttatatatttgttacatgcaaattataatatttaaaaagttatgaaaatatatattatttataagataaaataagtaattaaaggaggtgtttaaaatgtaaattatattaaaatcggtataatagaaagagagaatttaaattgggaatatacaagtaatacaaaaattaggaggaatttcaacatgacaaatttatctgacatcattaaaaaagaaacaggaaaagaattagtaattcaagaatcaattttaatgacacctgaagaaatagaggaagtaattgggaataagccagaaagtgatattttagttcatactgcttatgatgaaagcacagatgaaaatgtaatgctattaacttcagatgctccagaatataaaccttgggctttagtaattcagaataataatggagaaaataaaattaaaatgctataagtataaatattagtatataggaatattcctatatactaatatttctttaataaaaaaatctatttttatttccattttattggattttatgttataataaatagagaaccaaaaaactattttcctaactttttatgtgaactcataaaaatataatataggttttgataggtaataatataaaattaatattattatatattaatttttaataaaataattatataataatattataggaggaaaacatttgtgatcagtaattttagaaagtttcatggtaataagaatcaagaaaaatttaatgaaaatcttattcttaataaggaaaatgaaagtattttaaattatttagatcctatttgtaaaacattagagattattccagagattacatatcttggatcatctgtagaaccaattaataaagtatataagtttaataaagaagaaaagacttctgatattgaacgctcagaactacaattaattaaaatgtccttccttattgaaaaagatgataagaaagaagaaataaataaatttatttactttccaaaattaattgattcacagtactttattattaacggcaatagatattatccaatctatcaattacttgatagtggtacttatcgtactaataaggctctcacacttaaaacattacttatgccaattgttctaagagaaaagaaagagacatttgatgatattaacggtgaaacacatacaatgttaaatgttgatcttgatttatttaagagtaaagttccattcttaatatatttcttctctaaatttggatttgaaggaactcttgaatattttggtttacaagatttaattcatgtcttaatgaaagaagatttagatcaattggatgaagatgaacttaatgataatgtaatttttatgattactaaaaatatttccttagttgttgataagaatttctttagtaataaaaataatcagattattattgccacattacttaactgctttaatactagaattaaaattgataagatttatgaaaaagattattgggtgaagaaactcggtggttactttactactaataatagtaataagcaagaaaaaggagaaggaattattctttcatttgaacgtattcttgatgaatggactaagaaaattttgcgtacagaggaaaagaataaggaagatatttattcagtagttagatggatgattaataattatcttgctttagtaaaacaagataacatgaacttggctaataagagaatcagactatatgagtatctcttacatccattactaatcaaattcagtaaaggtacttatcgtgttttaaataatcgtaattctaataagtttgagaagattaaaacgatttttagtaacatccaagaaggtttcctagtaaagaaaattatcaataatgaattattacgttatgataatagtgtaaatagcattagtcttttcacactaattctaagatatacacaatctggtccacagagtccttttagctctaatagtacaaacaataaacttagaggacttcatccatcttacttagggagattaggtttaacttctacttctgctggtgatccaggagccagtggttctttgactcctttcttagaacttcctgagaatagttatatgcattttacagaagaaccagaaattaatttgaatattgatgatatctcaattgatgaagttattgaatcttaattataatacttgggaggaaaaattacaaaaagccatactaattagtatggctttatttttttttttaaaaaaaaaggagagcattaaaatggttcagaaattcttttaataattaatagtgatgttactattagtattcttaaataacctatttgaaaaaatattagaaattcaagaaaaaattaatgaatagttatttaccgtattaaaaatatttttcaagcatatattatattcctgtaatatcagactatttaaaagaggaggaatataatgtatgcctaacaccaaatcagtactgacagaattcaaagatcctctactggttacgaatcatttcacaaaagaaaaacgaatttttctaagaaagacgcttggtgaagattatagtatcctaagtagctctgaatttattaatgaaattgataatgatccattagaatttcttgatagaaagggggttaataaatacgatttggtaatatttgatactggtagtaatataaatgaaaaaattctagactcagtttcctcaaaaccactaactcttcaaagaaccacaaaaactactccatcattcaagcttctagaatttcataatgataaatttaatataatttaaaataaaaggataatcttagtgattatcctttttacatattcaaagattttaatgggggaatattggaatggatattaatggtagagtaatattagccgcaattgcggttattgtgggaggtacagtattaattagtataatacctttctcaagctttataattattgcatgtataataggagctgtaataccttggattcttcctagaaggaatgaacaaattcaacaatacaaccaagaacaagagtattatataaaattagaagaagagaatttaaaacttagagaacagttaaacctagaagaagaaaacctaagattaaaagaaagattaaaactagaggaagaaaatctaaaactaagagaagaattagaaaaattaaaggagaaataaaaatgaaattaacagaaattaaaaaagaagataaaattatattggttgaaaaatgcaaagaattacttaatctaaaagatgctaaactcccagatgagtattattattccagtcttgctttatgtgtaattgactctatcttttctattaattccaattatacaagtgtgaaaaatgtaattaagcgttattgcacttattttaatattaacccattaagagaaagtagttcattccctagtacatctaatcagttatctgtaaaaagttttattgattcttatgaaaaaataggggtagatttttacactcaaaaaatctttaataatagacaacgaacttcagcagttaatggaatattaaaatctgaagctgtttatgagttttgtaaagttctaaataagtataatattaattattttcaagatgtaaaaaacatatatggtaataaggaatttgaaaaagatattagaagtattaagggtcaaggaaaaggagtttcgttattatacttccttatgctttctggtgaagaagataaaataaaaccagatagaatgataattcgctttcttgaagagatccttcaaagaaagattaatataaatgaatcacagatattacttaaagaggcatcattaatactatcaaaagaatatccaaatttgagtccaagattattggattatacaatttgggaatatgctaggggaaattaaaaaccataatttcactatggtttttaatataaatttttaaaaataattactatgatttcttaaaagacagtgatgattatgaaaaatttcaattaattaatttggtttaacctttatagatgattcaacatcaaattctatcacggtctcttggcaataaattaaaagacattataagggaattcccttataatgtcttttcctaatagatatataatttttttctatttgcttgttttgctacattctgtctccacttatctaataactcttgttttctatctgttgcttcttgtaattcatctacgaataattcaatattaccaaatgcagtttggaggtttgcaaaccgttttctaatttgatataatacttctttcgtatcatataatgctaattttagaaattcagtttgaaggttagttggaattgtaccaaaatgatctggatggacaacatttaataaaagttttgtttttctaatagtatataaagcaggggttatagtaataatatttggataagtaaattggtaagtcattgggtttctattcattgatgatagatcagcttgtatttgtctactcacaggatcaatcatattattactataaggtactaattctgcaccaaagtatctagttgtattatcatacattcttgctacgtttaatatattataattagtattaatataatattggtttccagttccttcaactttatcttcatttgatataatagcttcaacttgataagggaaaaaattactaaatgtaactaatgtttcttctttaatattatcaataatttcatctggatccatttcaagttcattaaacttataacctaattttttttctatgaaccgaaggatataggtactagataacatattatcaaccctctctattattaactggtagaactaataaagtctacatccttcttaggaatatcttcaatttttgaataacgtttactcatagctctatgagtatagcaataatattctccatctttatttttggcaaaactacattcggttttcccaaatttattttcaatatattctttttcttttggagttaagggaatatgctgaattgcttcacttaataacaaactttcattaatcattttaaattttttattcataatatcctcctgtaatttaatatggttactctaattatagagtaaccatttattttaaaattgaattaaaaggaaattatcaatttcttttttaatttcatcttcaataaataaaacagctttaccgtcttcagtattaaaactaactgttttaccatcttcacctaatttggcagttctttcatctaaaccaagatgatcaactgttgttttaatattttgactctcttccttaatgtaattaaggatttcatcttgagccactgacaccattagaccttcattaagaattctcttattcataggatgaatagcatcttctttaataatatttgtctgataagcattagaatgagaagggaagattacccaatcccaagtaacaatgtgaagaggtttttcaactcgtgttagtccattcactttacgagtaacaccaccaagacctctcattgaaaatgctacttcagtaccttgtctaattaaaccttccatatctttaccaacagcagtgttagtagttgctaccacaccttttagtaatttttgttcccaccataatttctcaataacatgagacattctagtttgatcaatgtatgtctgtctttccattttatccgaaagagggtgcaaatatcttcatatggattcgctacttccataccgttctcttatgaactgctctaagtttccctagagttgagactatatcaagttcttcagcattactgttaagaacctctctatttccactatgcttatagtgtactcccatttgggatagtcgttgaactccattggtaaatatttgtacatatattttaccaataaagctgctgattgtccaatcttattagttcttataaccttcacgctcactgttaccagtcacgttgtggtctaataagctctaaggagtttccagcaattaagagagtttagacatagtatttctactatgaatggcaaccctaccagcctctccgaacaatgatttacgtcttaacttttcttgaatttgaggagaacgaatagcaccatctaatgcttcaaatgcatattcccttctatttctattaccagcttctgcctcttgaagaatagcttcaattacaacattatctttattatgctcaataatattaggtttaactggttctgatgtagattcaataattagaaaaccacaattttgatccattatttagccgcctttctaataacttaattaaatttattaattatatgttttctaataaaaaacatataattaagttaaatcataatatttaaaaggaggtacatcaaaatgttatccaaatatgagtcattgttattaattgaacatgaagaatttgattcatatagagaagaatattttttattaaaagaaggtttagcaactgatgttgataaaactactaaaggtatatttaatataattaaaaaactccattcctctagtgatgatagattaattgaaaatatgccagatttttctagactattaacacgttgtatcattattggaagtattgccgttatcagtcctgttatcggtcttattactttatatactagttcagccattagaagacgtaatgatgctaatagaagagaaaaattaattcatctttattcaagtaaattagaatatattgaagatcgattaactagagaatcagatgaaaagaaaagacaaaatatgattaaaatgaaaaataaattaaagagtgacttagataaactaaaagtcattaaagattaaatgaagggagtgtatatatgtgacagattttgatacccttctaattgattttaataaaaaattaatggaagatataaaacataataataattttttccttaaagaagatgaagacgatgatgtaggtatggatagtcttgaagacttatctgttggacattctaatgatcctgctcatccagaagatgaaacagatagtaaatctgatgaaactactgatgataatccaccagaatctttggatggaggagatgatagttcaaatccttcagatggagatactgatggttcagacgatcagggggatgatggctcaggaggtttggatagtgagcaagataccagtcctactgacaatgataagaaattacaattgtataagtcatacaagtcaatctacacatctatcgatacctttttagataaagtttcatcttataaggaatatttagatacagaagaaaataaaagtaagaattatgaacttgttgaatatatcgaagataaattatataatctaaaagatagtaccaaaattatgttaactgacaaaattaagacaatggattatgaaaaagtaaaaactgttttcgtatatacaaaaagtgaaattaacttactggtcaacctatttaacaaattttcttcttccaagtaataaacaatttaatagtaaaaaaattataaatcaatttattagattttatattagagagatctaaacaaaaaattattaaaatctaataattaagaaaaggagtaatgatcaatgtccgtagaatatcgtactaatcattcaactggaacaactgatgaattcagtcaaacattaaaagaaagtcatcaatatttcttacaaactcaacaagtaaacatccttggagaaggcttcagtgatgttctttctgaagcatccacttttagtgcttatgtagataaattagtagaaggcttagatgcaactgaagaagcagatatgcgtcaattacttgcgaacaaccgtcaagcaatccttcaagagtccgtagttgcaggtatccctccaattgcgtctctatctatgccaactattcgtaaaatgtgggctaagattgcattgaaatatgctattcctactgaacctgttaaaacacctgctttctctgtatcattctctaaaccttatatcattgattcagtatcaggtgaaaaacattatcttccagaatctcttcgttctttagataatggacttgctgaaaaaacaaaactttcttctcaagcttatgagctacctttggataacaaagatcttcttgctgatgtaggtgcttctgcacaagctggagatgcaattgatcgccgtttccatattgttgaagttgaagtttctgcggcaagtgcgactggaacagctgagactgctgaaacagttaaagtaaaagttaactctaaaattgatattaataacaaactatatgctgaagttaaagctaaacactctgatggtactgtaacttctgacgtacttatgggtgctgttgatccagaaaaaggtactgttagcttagtatctcttcgtcaagcagttaaaaaagttgtattccttggttatgtatcttctgaggctcataacagagcaactaacgtatctttcgatattgaacgtagagatatcactatcggaactggcgaacacttagaggcttctctaccacttgaaatgctaactgatactatggcactttatcaaattgatggtgctaatgaagtggtagacacaatgtctaacgttacagcccaaaaagttgaccaagaaatttataactttattgatgcggctttccaatctaaccctacttatatgggtaaatttaacgttcatcctgcacctcagtttgctggaaatcctagagactggttggatggtatcaaacgagtaattgattactttgctcaaaaaattaaatctgaaacttactactaccaaggttactttgtaattgttgggaacccacttgatactgctttgattccaaatgttacttggacatttaaccgagtatcagatgctcaaaatggtattgaagtagattacagtattggagctgtttctggtgcaagccgttacacaattgtttcttctgacttgattcctcaaggagaattgacaatgttcatggttccacttactaataaatttatgacgttcaagtactatccgtacactttcaatgttgtacacaactacctgaacactcgtaatcctaatattccatccattatgatgactaaacgtcatacccttgaagagttccttccaatggtatgcaaaatcaaaattgagaacaatgatggtactcttgtttctcagtataatggataataaataaaaatatcagttgtgaccataacggttacaactgatatttattttaagaggtgtagatgtatggtagatactattttactagaaaaaatttatcatagaacagaattggatcaattagatgaatgctttgaagaaatacttaatctactaccatcaaaaaattttaaagatgctggttttaaaagaaatatatcaaaaatagaaaaactcttgaagagtacttttaatatagattgtaaaatttttcttcatccaacattaagtaataaagtaagttatggtatgagaattttcccttcttatgaagaaatgaaaggacaatatttagaagccattgaatctaagaaaaaaggttatcagttaattgattgtcataatgtatcaattgaaattgaaggatctcttttaaacctatttaaaagagaaggagcaacatctagaatgctaactgcaattttaattcatgaaattggacataaagtatatgttaaagttcaaaatgctcttagggatgaagaaaattctaagaatatggctaatattggttatggcatgggattagctatggcagtactctctatgaccgttagaatgggtaagagaactttatcagttccattaactgtaatgagtccaattataggttttgtaggtttggttatgattgtaatgggcacaagttctcttatggattttgttgcaaataaatattattcagagagagaaatatatagtgatagtttagcagttaaatatggttatgctgatgagatgtatcaaactctttcaatgcttcaaaatcacactaactcaacccataaaattagcacgaatgtatttatcaattggataaggaaaaatttaaacttctattatttaagaagaaaaggagttattgatgttcttaaaaaagaatatcagactgctgaaaccgaattagagaaagaattgattaagaaagtactaattgatttaaataataaacagaataaagattttggtgaggataatactcttttactaaaaaaataaagaagggcaaagtagctgtccttctttattataattactcagttattaattgtccaagattatcaactacactattagcaaatggtccaatatcatacaagtcatcttccatatcatttagttctccaataaattcactattactatcatcatctagttctacaaaatcaaagctaatttcatcaataccatcaagtagttctttgacctccgctttactcatttcaaattcctccttgagtgagagtggtatttctagttgtttttattttaaccagaaaacttcatcttgaaactcaaaaagaaaaaaaattcacctgaactagtttatacaggtgaatctctaagatgttttatgttagtttagttaataggattctaaatccatttacactaacaggagaatattgaatactagttatatttttatctggaaattggtttcttatataattttcagtttcttcattttcaggtatagcaaaataatccaaaatggagttatcactattttcaaatgttataaaagcaccatataatttgtactcaaatccttctattccatgagttttcttatattcagtaattatcttatcagatattcccatagtttctaaagcagttaatatcattttttcagaaagatcaccaagtttgtcaatactctttaatcttttcttactcatataatctattaatttacttagattatctaaaccattccgtcttaataagttaaacgttcttaagtctagtaaatctttatcaatttgatatgttaaatttttctttcttttaccttcttgtatttcttcatttttacatttttcaaatgctgtccatactaactgatttactcttgctgatgatagatttacgatctgtcctacttcttcattagaaagtattctatctccaccaaattttataattactgtctgtaattcattattcgtaatcacatctttgtttcttttaaagaatttaattacatcctctaattcataattaattccaaagtattctattatttccttgtcaatatttcttctctcttttcgtaccaatgactttctctcctttcactctttctcatatataatatatacttagttttatattttaatacggtacaaacattttattaatatatcataataggaggttgatt

SEQ ID NO: 3 - DNA, 200233 bp, bacteriophage
tagtaaccccttccttcaggaaggggggggggggaggaattggagtagatagataatactctatctactcggttaacttacatattacctagcaacgagttcctaactaagtatctattgtagcgcctagcgttcttctccttcttacaagtacgtagtctatctactagtaaccaaggtgaatgagctatgagttgtaagtctgttagtttagcatacttagtcaaacgtctagcagtgtgattagaatgtaaactaactctatctactccattgttaccacctattagacatttaccgtgcttaacatgctctactagagtacctctctgaatacctagagacatagtgccaccatacctatttctagtacctcctttcttgaatttaagtcggtgtagctgtctcctagtatgagtaagtggtttgagttctagtacgtgaatcatgtcaggtttcggttggttacccaaaacctcgttagctaacacccaggaatctacgcagtgagaatcaaacaacttagaagctttgttcgtagtcttaaacaaacctaaacgtcttctgaaggatgctgtttgacttcctttgaaagtgttaagagtaaaacccagctcagttattctaccgtataaccaattcttaccagcttgaatagctgagaatcttagattacgtctactaccacctttctcagtagcgacgttgacatcctctacaaccacgtctgtaactggatataacctagcaaaccacttcagaatgttaagtttaagttgccacctagctttagtagagggtggaacccaccctttacttctggaacgattcattttgttagctcggtacggtgtcttacgatatcgtctagctctcctagagttacttctggcctccataatcttctttatgtgcttagcattagcagctagtgagttgacgtttaagaaagtacgagtagctgacttaaccgtgtatccttcaaagctacttcctggatctataccaaccgcaacggattgaacatcaccatcacttctatccgttagtttgatgtaaaacaaacctttaaggtgtctaggtatagctttacctttggacattagtttcctagctctcttgggagagcaaggcatcaagggtttacctgtggaagacaccacaggaacccatctttgttttgcagagtcactggagttcaacatgtgaacacctccataaattagtcccttacgggatcttgataacaagttagggtctcttcgccactttctaccatagaggtccgaactagagaagtattcgagacgtattcctgtgactaccacgtcgctgtagctaagttacaaaccggctagtacaactgtttagtctcgctggagtagtttggctactcttcacaagccccttccttcagggaggggtagttgactgatttaacctttctgtggttgtatgtgcattgagattagataagtctttagtgtcttagtagactctactccagttgaatacgtggatagtgacttaagatctactgtgccgtatctacccatcatagcgttgtaagcattgaacccacctttatcaccaccgcgaaactgagtgagttcagtgatagtcttatctagtcccatacccattagtacttgtagttcaggataagagatcttagcgcccttagaagctcctgtgggttggaaggtgagttcatctatagtcttgttgtcatctggtaatgaaatctttttatagagagtctgagactgtctacgaaacggtaggtcaatcactaagtacttgttaggagtcatgtgatctggtttatctggatcgttctctatcttaagacgttcgaagaattctacaccatacttcttagctatctttagattgttctctacagttacaccattggccttgtacataggtttgaaaaatacaattgactgggtaccttcttgtatttttttcatccagttatcgaaatctttatctgacatctgtttaaagatagtgttgtactgttctacgttatatccagttggttctatatctttaagaaattcaagtatgaaggcttcagctttctttctgtttgacatgaggggaatccttctatagggaaatgtagtcaaaacatagcttggggtgtaggaattgaatttcaatacagtgactggtttttggacctaagtaggtttatttctgagtgaggagcaagacatgcgaattaaaacacatagacaaggtggacatgagtcaggtggattgtctctaggtggcggtaagatggctggtccattgacactgtttagagatcccattgaagaactagaagccgtgacaaaacaatatgtagatacattaggtactcgtttagacgcaagttctatcaagactggtattctacctgatcgtttgttaggtggatggcagggtgatgttactactgacgtaggtagtcgagttactacagttggtggtgttgttactccaggtgagtatacaagtgtggaagtaagtgatacaggtcgcgtggttgatggtggtttgataaccgctaacgatgtacctggtttagattggactaagtttactaaagatatgccaagtgacttagccgggtacggtatcactgacggtattagtactcgcggtgatacattagaaggttacttgatcctggaagatcatccttctatagacaatgagatctctagtaaacaacacaccgatagtttgtttcctattgaagataaagatcgcgttaaagttggtgatgttattcgtaagactacggatgttactcctccaggtttcttaaagtgtaatggttctattgtagataaaactatgtacgctaatttatacgcttctgttggtaataagtttaataataacatatctaaaggaaacggaactccatggttccaacagtatgaaataaattcggaacccactaccccgacttttaattggactgtaggttcttctatgccagtttctggagggggtgcaagatctaatattctagttactaaaaatagagtttatatcttaggtaatactgctagttcagcgatattgtctgctcctatattaccaaacggcgatgtaggaacatggacggtagttggggatataaattatattaaccccatcactagtaaaaaacaaaccatgtggtattcaagtggagttgtagtttataataatgttgtttaccttataggtggtggggggtttaactttgcttgttttaaagccactataaaccccgatggcactattggatctttcacacttttacccaatcctttaattgaggtaaatcgaaactttagtcactttgttttaggtaataaaatttatgtggttggtggttacaaagatacgttacctggtttagattctttgccaggtggtcatgtatataacacttattcttgttatataaacacggacggaagtttaactccatggacattagaacctcacttagtatgtcctcctgaaaattctccagaacgaggtatagctgtagttactaaaaatagagtttatatggtaggattagaatctctaaactctaaaaacgtgttaatgtctgaaataaaagaagatttatctttaactccttgggtaattttaaaagattatttaccacaaaaaatagttgagtgtagaggtgtggttacaaataaatcagtttatttatttggtggcgctaatcatacaacatcaccttccgtattatctaacgatataaataaagccactattaatttagatggaactttatctaaatttgaaactattggacaagttccaagtttacccttcaccgattcaagatcaataattgtaaataataaattacatctattcggtatgaaggattcggaagatttaaactacattactatgagtactccatttccgggaggaagtaatgactactctgagtattataacggtagtcatttaaatttagtttattctaataaatttactttacctaatttaaatttccaaactaacaaccaatataactactacatcaagtactaacaaacactaactaaccaccaagggagcctctcggttcccttggtggtattctattatactcaacaccactaaaagaagtattcttcgttctctttcaagaatggtaatataactaacttaacatcatctaaccaaccttctgatccattagctatattcaaagccatacgaatctgtttaggtactgcactctctttagtggagttcataaacaaaccatgaaacaacatagttaagtaagtgcgctgtacattcatagctttatcataagccatagcaaagttaccgttaccggttaccttctgaatactctcttctttaaaacccattcgtcgcatttcttctacaacaatactacatagattaatatccacatcgaccacccatttctaaattaattatatccgatatactttagaccagacacacagtaggacttcaccgtatgttcaaaataattaaaaaactctttactaagaaagagtctccagataaacctaaagaagttcctgtagagacgcacaactatgatctcattaatatcataacaaacataatacacagtgatgactttgaacacatctactttaaaccagtgagtaagatctatctcattactgtatatagtatgtcactctcagatctcttagataacataactaataagaacttcaacagaagtatctcagctgttagtctacataactatctagaagactctcaccatgacctacagcgacagttctttcgtatcttgaagatactacccagttacaaactatcacctctcatagaacatgaccttatagagttctgtgatgcgtattcttatttgaaagaacttggagtgaagtaatggaatccaaacttaaaccttattctcttggtatagtagttgaacataaaccaagaggtagttcaaccgtactagtttcacctgtagagacacttaacctacaaggtgaaggaagtatgagagaagcttctaagtcctttaaaggagctatcccggactctactaactcttcctttaagacagaacaaacatctactaactacatacgtgctaaatggttacctttaggtacgtctaatagaacaacaccacctgacgttagagccggtgagactattcttatctataagtttgctaacgtagaagagtatttctgggaagacgctatgaccgaacctgagttacgtcgtttagaggatgttctctattcgtattctaacttagctggtggtggtgctccccatgacttagagtctagttactgggtacgtgttaatactaaagataagtacatacacttacacaccactacctcagatggtgaaccttttgagtatgatatcaagatagacactgctttaggtaacatcaagattaatgatagtgttgggaatgatattaaattagattctcctaccaatacagtagagataaacactcaacacgaatgtaatattacaacagcaactaacatcaacttaacaactggtagcactgttaagattgtagctggttcattagcacaggtggtagctcctaacataacgttagatggtgatactacagtaactaagtccttaacaatacaaggaccaactaaagctatgaaagtaatagacgttaatgatgttgtgttagctagaaactttgtacagaaataaacaacttggagataccgatacatgaaacttctttttcagaaaaaaccagagtttaccgaagtagatccgtataaaatgttgataaacataggttgcctaatggatataccagtaggttcttatgttcgtggtcagaaaggtgagaacttaatgaatggtggtttctctaacctagtagctattgctggtaagggtaacacgttcaagagtactattgcgcattacatgttcttatctgctgctagtaaaatggctgcttctggtttgatgccttacctgaacacctatgatactgaaatgaacattagtttagatcgtcttaatcgctttgctcagatctttcctgagtttgaaggttttgatctacataaggaaggagtttggtcagttacagataagactcttcacttaggtaatgaatggtttaagattcttaaagatttcttacgtgaaactaaagtaaagaacaagaagagttataccttcgaaacaccgtttgttgacaaagacggtaaacctattcatatgttgttccctacctttggtgaagtagatagtatctcagagtttgagactgctgacattgaagagatgcagaataagaatgagattggtacctcaggtggtaacactatccatatgcgagctggtcttgctaagactcgtctgttaatggaactaccgggactgtgtaacaccacaggacactacatgatcatgactgctcacgtaggtaaagaaggtcctgacatgaacgctagtcctatgagtcgacccactaagactctacaacacatgaagtcaggtgaagctattaaaggtgttactggtaagttctttttcttacccaccgctgtgtggcaaactgcttcttctactcttcttaataaccaaggaactaaaggtcctgagtatcctcgtttacgtgatgatccagatccgaactcttcagatcttaacatcgtaaccattcgtatgttacgtagtaagtttggtccctctggtgttaaccttaaagtgattgtttctcagactgaaggtgttcttccttctttaactgaattccatttccttaaagaagattgtggtcgttatggtatcgaaggttctttacagaactacaacatggttctatatccagacgttaagttacaacgtacaaccgttcgtaatttaattgacactgatccattattacgtcgtgctattaagattactgctgacttagcacagattgctacgttctataaaactctaccgtttgctattccaccgattgaagacctttacaagaaacttgaagaagaatacggttggggtatcttactacaaacaagagacttctggactttcaatcactacgaccacccagtaccatatttaagcagtctggatctacttgagatgtactatggaacctacatcccatactggtgggatcctaagaccaagactgttaaatcacctaagaagaaataatcatggactcagctcaaactcaaagacctttttacagtggtcttcttggaggtaaagatatgtctgataataatcaagtactaccactaccaacaacacctatctctagtgagatcttagctctcttaggtcagcagacagataactttatctctctacaacacctatccaagacacaagactacaatccagcagctatcttcttagctcagactcttacttacattgaaggtgagatgggtcgtaatcctagtctagtagctgagtgtatgacttacttagatatgatggcggtgtattcactaactactagtggacaaccatctcatctatttgactctatggtagatgtaattattcatagtcgaactgtacctagtgatgaattagaaggtaaggtgttagcgttaactgctttatcagacttcctgtttgatggatcagatgcacttagaaccttcttgaaccacaataagtacttagtggctatgtatacctacacattaataggtcgtatctcactagctttccacgaagaagaataacctcaattaacggagtctctagtctaactggctagagactctccccattttttgaatatacacaggggttagctaatgaacactttaacttatgtaatcaatgagatcaaacaacgtataccgtttgaactcctccatgctggattaacgttcgatgaaacaccagagacagttaacttaacttctctagaagacaaactacttcgtaaagtaatacgttcccgtgtaatggttgacgctaacatcgttggtggtgttgagatgttgattcctcttagtggagtctatcctagctactatgaagacaactacacggtttacaacataccgcctgagttaactaacaaccgagagattatctcagctcttagtatgatgccaatgccaatcagtggtcatggtggtggtcgttttactggtacgatgggagctactcgtggtggtggtggatttggttctacatctcaagcagtcaatggtgtagctgaccgtatagggaacgcagcgtcctcctcagcaccgattggacacacacacatagaactagtagcctacaacacaatcgttgtctacgcacactacacacagatctcctctatgggtttacgtgttctattagagaacgataataaccttaacaatatacaaccaagaagttataataatcttgctatgttatctatgcttgctactaaagcttatttgtataacaagttaatcattcctattaatagcggttacttaatgggtggtcaagacttaggagtattcaagagtttgttagaagacttcaacggagctgaggaagagtatcagatctacttaagagaagtatggtctccagtagcctatatgaacgatactacaagacacaatcgtttcattagtagcatgcttgcacctgacttataaactcaactaggttgcctctgggtagcctagtttgtttatgttgttttttaaatacacgttgaatatagtagtagactaatactaaccccatatatagttaccaggagcactacaatgtctaagaaatttaatcccgagaaaaagaagttggctaaagttgttaaaagtgttgttgataacgaagaagtaatcattgacattgaagatgacgaaacgttcctagctaacaacccagttgactggaatgatcttaacaagttgaaagatgatctaggtaatacgattctaaactttgttggtcaaatcaaatcaaccattgagaacccacaggtagttaataacttaggtgatcgtgctgatgagttcaagaagttagttactttgttcttctctgacatcagtgatttcagtagccaagtcaaaacaacccgtggtgaacatgaacatcgtagtggtcgtattacttcactagaagactataacacttacaatcgcttagcaatcacttaccacaatctttacatggagttaatctctttaacttcaccaactatgtctagtattgtaatgttgatctcagacattacagctgacatggatattaaagctaagaaagaagctgaagaagcaatcgctgaaacagcagaagttattgaagttgaagccaatcaggagaacgttaaaaatgactgatcagaagaacgatgaaaaaccacttaacattgatgacattactaaggaagatttgatagttcctgaaagtacatcacctacgggtaagatccttaaccacggttatgagactacaataactgaagaagaagaacctgttcttgatttgaacgatgatgagttagatgaagttgaagaagaagacacttcattagacactatgtttgatcaagatcaacctgaagtgattgtagaggcacctaaggtagaagagaaggtagaagagaagcgtaaacctaacgcgcgtgtagaacaatctattacttcttctgaaccctttgagaaaggtcacacggtaaaccttccttcagttggtttaactgagtttaacgaaaagattcaacagttcaataaagtagacattgaaaacttaactgatgaactaactgcgtggcgtgaagtaagtgaaggtgctgttgagttctatactcctaacgacacttactctgagcgttttacagatcctacttctgaattccgtcaaggtatcgaagataaagaaggtaatctttctggtatcgctcccgttaagttccgtagcggtggtggtgagcttaaaggtaacgctgctgtattgaaagtatctcgtatgttaggtttaggtgatgttattaatatccctttaccacactcaggtatctgggtaacgattaaaccagctacagagaaagacttaattgacttctacaactctatctttagagagaagatcatgcttggtcgttctacttatggtttaactttaactaacttctctacgtacgttaacaaacgcttgtttgagttcattgttaacaaacacgtccatgcggttaactatgataaagaagctattccaaaagagaaactacaagactatatcctcatccatgattaccatgttcttgtgtggggttttatctgcagtctttatcctaatgggtataattatagtcgcgtctgtgttaatgacattgagaagtgtaccgctaaagaagaagctaaactaaacttagctaaactactttggattgataacaagtctttgtctgaagtacagaagaatattctttatgaagttcgtccaggtaaactgaactctgaacattataagaagttcatcagtgaacatactcgtgtgtcttccactgtacttactcttaagcaaggtatcaaagttactttcaaagtacctacctttgctgaacatattgaagacggtatgagttggatcactaccatcaacaataagatcgagagtgagatcattgatgctgacttgagcgatgataaagaagaagaagctaagaatgaactactgactcagtatgttaagtcatctgcgttacgtagtatcagtcacttcatcgactacattgagtttactgaagataaagagattgtaactgatcgtcgtagtatcagtcagatcttagagactatctctggtgatgacgatgtacgtgagaagatcactgaagctgttcttaagttccagtcagatactaccattgctcttattggtattcctgagtacacatgtaagtcatgtaactcaccacagaacaccgatccttacaacgagcgtttctcttcggtgattcctcttgatgtattgggtctggtttttttactcctaacttcgaagatctggaaaatcctggaacgggaagtttaggttatatagctaaccagtggttcggttacgatataggcttcgaagggtatttagaattagtaaaggaagctcttacaaagttcaagctaagtaagaactacctttacaacaaacaactactaatagaactgtacgagactaagttcggtatacgtgatcacattaaccatggtggtggattagcttctgtttcgtttaacgattctgagaagtatatgcacaactacttatacgagaaatacttaagtagtttcatgtaccgaaacataggaacaaagcttaacataagttttgatgattatatagatagaccaagatacgatatagagacgatcaatagactagctgacaagatggatcaagagaagattaaagctaactcagacactctaggagatcttgagaagagttataaagatccaggtaagaaagactcaatgttaatgtaactctaccacctaggagcaatcctgggtggtagacattggattgttttatagctacatatatagtaagtatacaagtactgtattcttacagtgctattacttagttgtacacacagtacattataactggagaactaaaatgtatagcgaactaaacatattaagagattcaaaaagattcgacgttggaaatttcatcaagaagaaaagtttggagaaacaatctggcgagaacttcacctttggtagtgttactatagactgtgatttaaggaagggactggacgacttaacaataagtaccgttacatacacagaaggtaatcaagttaacgtttatctactagacggttaccttcccgagaataattctaaactagatcttatccagactgtatctaagttgaagcccaaccacggttataagatagagatagttataactaactctgagttgtctttactacaactactgtttaagaaattacaaacagttgaagtagactttatatcttcttggaatttacaatttctagtagacaaaacaacagacactctagataacttaaaaaaggaacctggagaactctttgacgataacttatatcacaagtggagtattaaagaacgaaacccaagggatggagcgagacttttagctcctcaccagcgttggattgagttagcatttgacaatagaagtttgatgttatgttctatgcaagtttatagtcaactacgttctcacctaacgctagatagttatagtatatctaatgttttaaagaaagagtctgttagttctggagactttacaggatacggaaaagttgacactaaaacaggtataaattggcatatcgaaatgcaggaacaatatcctttagactatttagctatccatgtggtagatgctattgatgaaagtaatctaaacaaacacactcaagactttagtgtaaacttacctaacctatatttaaaggaagattaaaatgcctaaactaatagttgaacaactgaacatcacacaagtaactggtaaactagtaaatctaacagtcacacaacacccacgtcttttgaagttaattgaaatgctaaagttggacatagaagatgttagtgttgctcttaagactataaaagttctatggggcgctaagtgtcttgaaaaggaacatcgaatcttaatgggtgtagtagataaaaggggtatcattcatacggttatgttaaagactgatgatcatgttgagttttacggtaactagtacggataccctaagtgttgtattgacgagtttaaagtcagaagcattaaaggtaaagaagctaatgtgtttgacggtacaggttatgtagcttgtcctgaatgtaggaaaaaagaccctagtgaaatagtagagtacatcaccaacaatagactagcctcgtttccctttaatcttcgtaacaacgctataagtgaaatattggatgtgattatgcattataacttcattagcgagatgcaggaaaaacataaggaaatcaatctctctgtaagtacctcaactgacgaaattaccttaatgcaatttagtaaattagttaaaggtatagaaagttgtgagaacactcgaccagaactgaaaaaagaattaattgctctacgtgaagaagtgaatcaaattctatacaattttgaaaacggagaagatcaaccagaaaactctatatccttaacgtttgataagatacagcaatacaagaaatacttctaagagtaactaccactacccggctttcgctaggtagtggtttcttttttctataattacatttgaaatttctacagttacatatataataagtatagagactgtagtaatctttactcagtcattcttttagctatctcgaatacatcgagtagcccaacgacctggaggtcaacatgaaaaagattgaagatatgatgtttttgcaagtagctcatgggggttacccagcgggcactcccgtggtggaggctgagaagagctcagcacactaccaagccaccgccatgttaggcggtcggcaggtgccgaccatctattgcaaactggccggcgcggagggaccagccaccctcgccatccctcgctttgagggactggttggggataaacatcccaccgaccccgaagtagtgggaccgtttgtatgtacgggccttggccgcgtggcggaggataaactcccaccggagtacgcggcgtacattgccgtgggttatgattacccatacgctaagttcgatgtgtgtgtcaacaccgtgacggacagcggtaaggtccgcgtagagttaccaaaacacccagtcgtaaactttcgggaggaagttgagaagtacctagaggaactcaaatctaaaggaaaggaactggaggtcgagtacaaagactacggtacttactagtaccccagtattaagagagcccattatgggttctctttttttctttatttactctaagcttctttaaaggatagtatctctacccttacctaagttactacttaacaaacataaccctccctagagacctacagaggctctagggaggatagtttcactcttactgttgtgttagcttatcttgttctatcttaaacaactcacctactgtaaagttgtcatcaagtatcactcctaaagaagctaaaatgattctttgttgactagtagtatctagaatgattcgtttgatatcaatgactcttagaatctcatctggtataccactaccttgaatgtaagtttcgttgatgtacatagttggtaagtctttcttgttgtgatcttctaaccacaaaccaaacctttcagctaaagctctatcttcaataccatctaaccaatccttaagtttagttctacttgttatagtagtaggtatcttgatgcagtcataaggaggagcttgccactcaccgtacttaggagcaaaaacgttttgccatagagtgtgtcgttggtaaggagatctcttctcgtcttgagagtacgagtctggagtatttactttacttttacgtaagtacatagcctctccacggttaacactatcaatgatgtctgtctcaataccaactatatctctgatgacatcgttgagtttaatcttcttgttgttactaactgactctaagatataatccattaacttatatccacgctcaatcacgtgtgttggtatagcagaagactgtaacccaacccctttaatctcaacgtcaggtttacggaaaacgttaccttcttgaattacggtctgtgcaaagtaatgtttactaagttcagttgtaatgtgagttaaccacaagtactcgttcttcatagctaaagtgtgtaggaactctttatctacgttcatgttactggacaagatagctaacttgtttacaatcgcttgtgatgctatataagacactacaccagctagtccgatagtttcatcagttacaatgtaatctcctttataccaagtgatccactcgtctagcgtaaagcaagttgagtcagtgtcactaagaacaacacagcgacgtaacatgttctttaaacggaacgagttaactggcatcttgtcgttcataaagaaagtgttgaagaacaactggtacttatacaacgtagagataaactgttctgctgtcttgtgtaaagaagaagctaacgaagtcttgttcatctcagcgtaatctttacctttacctttaacatcagtaaagaagatagtatgtacgcagttcattacagattcatctattgtgtataacacagaaggatcatccataacctcgtcactagtaaccttaactaataactcagataacaagttacgtaagaaaccatcgttaaactttctaaggtggtataggtcaccagaataacaaatcatagctagttgatatgagtttaagttattaaggaaaggaataattctagtagcataatagttgttatctgaaaagtaaagatctgtagagaacttaagaacttctacagtgtcttctacggttggtaagtgtaagttgaacttagctacagtttgttgtatagcttctaagtcaatttcagtagtcatgtagaccatgtagttaagaacgtcttcaggagaaggaaggtaacggttacctgctatcaagtgctcgttacttgcgttacttaaactagtgatggttctagtaatagatgttaacgtgttatgtgctgttgggttatgaagcacacaagctctgctactaaacactccagataaggagttgttacgaatcttcatggtgttttgttgatagttcttagcaacagatagttccatgtttccatcagctttagctttctgactttctttctttgctatagcacgcttacgtacgttttgaaaaatgaactctgacagaatacttttcttcacactcatattaacataagaagtaaaggtaggtactaagatattcttactagctaagttctcttttatataagtcatcagagtagagtctttaactaccctgtctccgttctcttccctatggaaatgtttgatgttcttatctttaaaatgtgtctttactaatgtaatggccttctctcttgctacactcaacggtagttgtttactagtagagatgtagtgagtcaactgttttacgtattcgttaataggattaagctgactgttatattcagttttatctttgaagaaaatgtctttcatatcgacctccagtgatcaacccatatatctttttgttttattagaatagcgttatccaaaatcctttgatatttaacaggagactacccatgtctaacgataatccagaagaaattgtaacacaagttaaagtacaacgagtaatggctaacgctattcccctcagcaacatcttagaacttagcgtctctgtaatcaagaagttagctggttctgacatggcagatactatcggtgaacaaacactcactcgtgaagtattaactaacttagtagctaaccgaattaaagaaaaacttctgtaggagaaagtagtaatgattaataaagcatccgcacagatagctactaaccttggaactatcttagctgaaaaggagttaaagattgttcctaaatcaggtactcttctttcaaacttaactgcaagcattcaagctaacttgtattcaggatctaactcagttgaaatgattcctgagatgattgagatggctgctggtggagttattcgtaactctagctatacagcttccgaacatgactcttacatggataacttaattgaagatctatctaaattagtttcttcttacatctccatgattcgtggcacggttaatccagtagttactaagttcactgatcgtttagttgatgtaatgaatcaacacaagtaccgtgccgctgaagagttctttaatatagaatacttcaaaccacacacagtcttcacaactccgttggttacttctgaagttaaaggttatgacaacttcactaagagtacttttaaagaacatctcaaccttgaaattattcgtggtgaagagtttggtcttttagattacttaatgactggagatcactctcaagacttagaaattcgtaactggttctctggtgtagaaaacttagctaagagttacatcactgatgatgttcctgaatacactatgtctgttcgtaatctacttagttacggtttgttgaactatctgttctatcgtaacttagctgagaagactgatatcgaaacaggtgatagtatcactgagcttcgtaataaagcagctagtaaccgtgattattatggtcgtcaattagctacttctattggttactacgagaaagctattcgcactggtaagttactttcttctgtatctgataacactttctcttacatgggtaacgattcagttgacttagttatctatgaagatagttttgcttccttcgctaaagacggtggtgatattgaagttctgtttggttacctcgctactaaccaaccaactctatatctagaaagttctgctttacttaagcaagctgacttctatcgtgagaaatggaatatcactcgtaactcgtatctgatgttcttaaataactctaagttgaattccttcaagaacttgttaactcaagtgtttgatagttctttactagagactgttgaacatgaagctatgcagaaacatattactagtgatcctggttacctggaaaagactcgtcagttaggctatgctttcattgatgacttagatgtttctgatatggataacttagataaaattgttctagttctagtggctaagattcgtttccgtttcactaacgcttatttactgttacgtgatatgcaagaatgtatggctatgtcagaagacatgactccaatggaagcatctttgtatgcgtctgttcgttatgttactgactatatgttagagcaagctgatttagtaacaggttaaaaataaataaaatgtaatactgtggaaaaatacacgacaacagcagaagcgatgtgtctagtgtaatgtcaacttaacttgttaatttcaattacccttattacatatctttgaaattacagtaagcaatgcgttagttctagatacaattgtgttttttcttattgtagttagggacagaggatacctgctcacgcgggtatcctctagttcttacacgcatattgttttttcattcctaattagataccatgaatagacattatcggttagtagtaatctatggacaataaaaaaaccacatcaaagagtttcgatatagtatcgttaaccataggtaatatccttgtaggtataattactttagggtatgtgttatatagtttaatgtatccctaggaggatatatgcctaaaagactagaagagtgtgaagttagattaaagttagttacagaagaattagaacaaactaaatcagatttaactaaattaaaaacatctattaaaagagtaatgtttagaaccatggttgtaactgtaatagcgacagtttcgattgcaatttggttatattacttatagatcaaatggagacaacatgtcaactgaaaaagttgttaagagtgaagtaaggtttgcttggcatttacctaagaacgactatcgtcctgacttacattacattcgagaggatttgacgtacgcagatggttttgttaaacctaacatacgactagtgaaagactacgaacgtccagtgtgggtaactacacaagctttcagagaccataaagataagaaagagtatgagtacattgatcggttaaacatcattagaactacacagtcagatatgacttctaatgttgctaaattattaggtcaaggacatttagctaacaaccctaaagctgttaaagatagtccttatgtatatggattagatgttacttctacttcgttaattaagttagctagtttgaaacgtaacgactacacacatacaccttcaactgtagctacctttgatattgaaactcagattggtcacaacggtgagatccttatggctactatagctatgaagggaaagactcacactgcaatcatgaagagtttcttaccaggtatacctgaccctgaagctcgcatcaagaaagcattcaaatattacttacctcagtatgaagacttaaacactatgtttagttttcatgacgatgagattagtatgttgagacatatctttcgtatagctaacgaatggtctccagtattcttagctatctggaatatggactttgatattcctaaagtgttagaacgaattaaagctaagaacggtaatcaagctgagatcatttgtgatccaaacattccagcttacgctagaacttgtagatatcgtcaaggtccttctaaaaagacaactcagtcaggaaaggtcacacccattcacccagcgcttcgctggcacactcttacaactagctctactttctatgtaatcgacgccatgtgcgtctacagacagcttagaatggctgatgctgctttacctagctatagtttagattatgttctcactaacgtactaggaacaggtaaacttaagttcacagaagcagatgcttacggtggtgctaagtggcatacttttatgcaagagaactatccggtagaatatatcgtatataacatctatgactgtttaagtatgttggagttagaagagaagactggtgatctaagtaagtcacttcctttctttgctgagattacagactttcaaaagttcaatagtcaagtgcgtaaagtaacagatgctgctttcttgtttggtctagaacataaccgagtaattggcactgttggtaatgtcgattacgacgaagcggaggaagttgagttacctgaagaagaagatctcttaggtgaagacggtgaatatgatcctgagaagtttaagactttagacttacgagattggattcagctattaccacaaaaccaattgttgaaaggtggtcttaagtgtttagaagactaccctgacgtagtaactaacgttagaggtattacctgtgacttagatgctacttcttcttatccttcgtgtacgttagttggtaacgtatctaaagagacttgtgtagatgagttgattgagattgaaggtattagagagaacgtgttcagggaacaaaacttaagcatttgtttaggtggagttaataccttagaatactttaataaaatgtttggcttacctacactagaagagatagataagctatttgaaactatgtagaggtgtgttatgggtatctatgtaatatctgccttccctggtttagggaaaacctacgctacgcaaaagttagtggaagaaggattcaatgttagtgactcagatagtagtcattttaataaagaacatttccctggtaactatgtagaacatattaagtctaagatacaagactatagagacatgaacactagcagtgctaagttcatttttgtatctactcataaagaagtgagggatgctttaatagagaacggtattaagtttgttatcttctaccctgacgttggttctaaggatgatatctttaaacgttatgaggaaagaggaagtaacgaagctttcattaaacatctagaaactaattacgacagttggatagaagaaattaaagaagatgtagctattgaaaacaaataccctgttactaacggagtgtttctttacgatgtagttcgatctactttcattgacaacgagagtgtatctggattagtgtagtatcttgtggacattctagttactaacggtcgctacactctagagttgtaccgagtacataactgttggctttcggttaatgtacgggctatctcctgtttggtcgccagtagggtttcctactggtggccattttttgaattacatctttaggagctgtcatgcgacacatctctcttgaactcattgactatcagaatagtgactcttttcctgatcagctaacttcattaatagaagaagctctttcagatatagacaataagaaatataaaaccaacgaagaactattaaagaaatctaaacacgttagtaacatcattagactgattaagaaacgtttcaatatgaacattgtttttgatccgacgttatctaactttatgcctgctgcaattattccttttgaatctgattacttaacttcaggtgatcaatttaacggtatatctaaatctgactttatgagtatgtttcagggtagaggtttatacaaacatattcgtaatgtagaaatagaaagaaaaactcttcgtaaatctttacatgataaaactgggtacattaatcttaaaggcgctagattaggtggatacctttcagaggctaaacactaccttatcattaacttctttagtcttaagatgttaggtatgtcagcaagagaaataactgctgttattctccatgaagtaggtcatgcttttactggtttagaaacacaccatcggttaagtactacaaactccactatcatggatataatggataagctaaacaaacatcaaatagatgaagcagagtacctttacaaacatcacttcactgctgaagacgttaaagacgctgaacatcataacaacgatcctatagttaacttctatggtaagttagctcgcagttatgttaaggaattagattcacagttacttgatggtaagtatgatgaaactaactttgagaatttagctgatagttttgcaggtagatttaatcttagtgatgctcttgtaactggtttagataagttacattcaagacacgggaatacttacagtggtaatagtggtagaatgatttactttactgctcttttactcaatgtgtttattttgttattcctgttagcatctcagatgtatatgtcctttacctttcttatgttggttgctgttctgttctttggaactaaagatagtatacttacctatgataatcctaaagaacgttacaaccgcattcgtaatggtatcaccaacaacctcaagaacactgaactaccagatgacatggttaagatgttattagaacagtgggttaaaataactgagattttagatgcagtgattaacaacaagatcttacctgaggttatagctgattcatttatacctagtaacagatctataactaagaacattgaagttcaacagttagtagagaatagtctcaacaacatccttttcgttaaatctgcccaagtacgggtatcttaatctggagtatcaaaatggctacattacctaaagaacttacaaacaaactctatagcttccagcaacgtaaacttacttcaggtgagactgttctattagctaaagctttaactgacgctatagatctaccttcaccaaaaattgaaagtgttaaacaatacatcattggaaagaaaactctgattaataacgtaatggatgtgttgtgtaaatacgtttacggtgacagtgatttagaagatcaactcactaacctaatgtctgggtttatgagctggcgtgtaagtgttgcatatcgtcctagtcgtgttatcttcagtggtgacagtaacaacgtagttgatgacttaactactatgttacgttatgttgattgtgcacgtttagctactatcggtgataacatcgaaaacgctaaccttacgttctctatttttgctgatgtcattgactgtgttaagagaggttgagtatgagcttatctgatcatttagatgacataatggatgacgttttacctaacggtgaaatctctaccgaatcactagacgtgaagcgagtgactatggatatcattcgtgatagttcaaagactagaactgttgttaaactagataagaacttctctaagaaacttaacatgttatacgacaccattcgaatcaaagcttctttagaaaatcaggaagttcttgattacaatatggctctagaagctatggctggtatggatgatcccgtaaccatacgtgctaagctaaccaagaccccgtcacgcctcaataaagctttagtagtatctgagttagagtctacgtcagatgtacttcctgcggagtacgaggagcgtctgtacgagctatggcagctatatgaagagactaaggaagatcgttctgacctgaagagttctttacaacagctaatggctcattacgtaactgagatggatcgtttagttgattatcctcctatggttatttgtaacggagaaagttttaatctatacactcacccgctagtaaacattattggtattgatgatactaaattaatgtacgataagtacagcggtgtgttagttaagaaatttgaatggttgcatactagtgatgatttagcttctttgttacgttccggagacactaacactttagatgtttcatctgaagctgagaaggacattgatttagatgttactgaagaagaagaaaacattgcttctaagttagcctctaaaattgatatgacagaagaccctgaagtagtcacggaagatcacaatgcaaatccagtaacgcttgttaaagttgaaagtaaaagtttagaaagtatagttcaagaagtacatagttctatgtatattctactagaaagtcttaatgaagtagctaactgtgaagatcgagttaattgtttagttaaagctattcagactaacaaggaagataaacaaccaactagtttaactagtgaagttcatttcactgtaaaccaacttcctaattcctataagcaacttacacacatagctgatgtatgtgatctgttagctactaaggataatccgtttgacattctattggaattactaaagtttatagactaagtataaaaacatccacctagctattacggctaggtggatgtttacttacacgagttggaacgtaatgttaatgtcgtctaccaggttataaccacctggttctattactagtttctttctaagacttagtcgtccgttgttatctagaagttctatgtactctgaattggtttcagtaaacttactaatagacacactttcaacaaactcctttagttctccatagagaagttctagtagttctgtcttcttcaagatagtagagttgtacaaatactgatcagttgctttcacaacaatactagtaatgtcatctcgaatgtctttatcagagtaaactctctcagttacaaacacttctacgtttaatgtttgactagaagggatagttgtaataccaccatctcgtcttactgtaacgtagtctaggttcttaggaacaaccacaaaggcttctgtgttctctaacaactgagattgtatttcattagcaccgttaactatcttatcggtaatatagtttcttaccatattcttatattctacaacttctttattattagctaatactaacttatgatccaccaccatcaagttaaaataacgctctaattctagttcctttactttagttggtttaccattttcatctaagatgaaatctcctttaaggaattggtatataggattaccttctgcatctagaacgatatcatttttataatgtataattgcattactgttatcatacacgtcatgtttatatcgcataggtagatgttcagtgtaagtagcgtattgatctaaaccaacgctggtgtgtacacgagtaaacaatctctctagatgagatccaaagtacagatctaattcctctaaactaactacagcgttactagctgctaaataagtaccttgaacgtattgatctaactcactacctataaatccatctggaatgtaattagtcaagtagattaattctatcttagattctaatccaatatgaagatctataaggttaccagagctatctcggaagttccttacacgtatcttgttgttcttatctatatagtagttggagtctaaatcaaaacgatatactggagtagtatcactctgtgctgctagattaccttctaaatagaaacgtgttctatcaccatcagtgtagactaggtaaggagtaatgttagttgcattcaactcttcactatacttcttaaagttaactaagacatctaaacgaaatccgttaacaaacttatacaagttagtagtagtagtgtttatccctactcgtgtagttggattgtaagacttaaagttaatacgcattacttcagaagcactaatatcataagctcttaactcagtacgatcttcagtagtatctaacacgtagtgataaaaggtagacacataactcttagtgttcatttccatagttaacaaagaactagagagtgaattcaacctgtctacttcaagagtatctaatagatacaaaccgtttggtgtaatgttaaacacagtaccttcaggaataataacgatgtcgtcactaacaccgactataccgtttttaccttttaacaaatcactcaccggagttctgtactcaataatgtctaagttgaacttagttagaatataacgagaagcaggttccggtataggacactctagtaggaaagttctattggtaactatgtcaacatctttaatgattctaaagttgttcttggaagtatagaactccatctgcttgtttgtaattggaataccacgatcaccaacactgttactgattacgttgttcttgagttcttcaaaacccatagcagctttaccaccaaccaccgaaccacgaatgtaaactactttgtttatcaactgtaaaggagcagtatctccatctaactctaagtcagggaagatatccccatactctacagagaaatcactaacaatgtactctgagaagtttacgttaataggtcctttagttgtgtagattacaaactttactttactacctaacttattaccgttaatataaacaggagggataaagtattctatagagttcttattcttaataaccttaacaacacaagtcggtgtttcaatatcataaacttgttctgtatgagtaaccaacatctcattccacttaccgtctttcatgtggtaagcacggaagtaatggaattctctattaggtttaaaggttaagtagttcttaaacagtttagatttctctaccggaatctctacagcttccacatctacttcaggtagtctaagttcaaacgttaagtaagtctcatcgttatctactttgaaagtgttgaagttaatgtagttagttccttgatcaaacataacgtctgtagctactatatcaaacttaacgtccatgatacctgtttcagttaaacgaataataactgctgtaggtattaggaaaacatagtcatcaatagtaactttactgttacgtggtatctttagaacatagtcaccagaacgaggatcaaagttagccttctctttgaagtcgttaataaggatattaaaatgtacgttagtgtatgctggttctgcaaatctacctaagtaatcaaaatctgacatatgtagatatagatcttcttcagtattagctaaacgaggatataacttacgagttaacaaagtgtgttcttgtatagcaaaagctgtattcaaagaactagtttctagtaagtagatgaatgggttactaggatcaacgatttctactttaccatctaacatgtcttgtagacggttaagacttttatttagaataccgtttgggtgatgtttgtatagtctcaagtcttgtaattctttcttgatatctatacctttacttggttgtatatctgacatgttcttctccgaaaacattaaacgtttgtaggatataatctttaaatacaggagtgacaattagaaggagtatacggacattttactaccctttaaaacggttagaatcagtccagagctctaattcatttgtaacaagatttatataaggatagcatctgtggttaagacttatacctgctgagcctacatcatacatatctccacccatagccacactgtgaggaaccttgacataagaagatccatgaactctatgtaacatagtctcactttcacgagctactgcttcttggttaaggttattgaagtctgactttaggatagctctcatgttaggattaaagatagccatggtctggttgaacttgagtttaagtatatcttcgaacgcaatgaaaccaaaacttctgaagcgaatactaatttcttcgttcttagtgttgtacggtgtgtctgttgagaagtcgaagatactaccggttggtacgttcaatggaaaactagcaccagttgatcctatgtaagtaacatacttcttattctgatctaatatcaatctgtagatacgagtgttgtaatctatctcgttttcagtaatcatatctagatagggatttaaaacaccttcaaacactaaggttgcatacttaacccacacatggaagaagtatataagaggattacctttgaagttcttgaaagaaacgtctaagtcaaaactctcatagtggttagttactccatctacgaaaccagactcttgaccgtacaatccagtttcagttgtatatgtaggcacagagatatctggccatccacttacactagtaacgttgttagttagtaatgggatgaatggattgagtgggtctacaaacggagatgtagctccttgttctttgctactaacaattcttggatctaacattaaccttgtgtacttctgataactcatatcgttatcagtcatcatactgtagaatcctctgtagttagagagattcattttagttaggttaagttgaggacgtgtaaagaaagtgaagccatacatatctttactacgaggaactgggttacctgtttgtttgtgattaataccgtagagattgttaccgatagctttagctatactacctactggtagattctctaagtactgatctacacttgcatctagaactatctcttgtggttttgtaccagctgttgcttgttgtggtcgtccagtaacggggtcagcactacccccgttagcacctccaccgcctatacctgtaggtttattactcatgttgtttacctctacctaacaatgtaggtttaatttactcaaaatagtatgaccacccgatgacaactgtgtttttatttgaaaacatcatctttaaaggaactttataatggctacagtaaactcttcagggaacactagcttcctaactcacatcagaaacgctatagtgacctacaagggaactgtaggtgatcctgtatctattgctgacgtatctaagatcgctcgtgtagaacctatcaccttagtgtcttctgacctagctggtatcaaagacttataccacgtcatgcacggtattttaaacatctatgctgcttattatctgcaagctgttagtattctttctgctgaactaattgatattcgtatccttaagatcttagataagactaaccctgaccgtgaccttaagactttcttagctgctggctatcatgctctagagtcagctggtgtacagattgacggtaacgttcgtgaacacttacgcactattagtttagaaggttgtgagtttggtttacctatgctcaaatctgataaagagaatggtttaaatatagctagtgagtctttcattaatgagaatgacgaacatgcgttatctacttctatctctaagttagaaacatttgagaaagttggttatgctgttggtaaagtattgaacgttaactttaagttagactcattacagaacgatcgtgaaagtgctcgtgaagttagtatgcctgtagtgattcgtttggacactatgatcttacctaatgacattatccgtagtttgtctactgctaactctgaagagattactattggtagtcgtttcaaagatgctttagctggtcgtattggtttcattaaagactttattcttgctagtgatttaattaagtcacagaagaagtcaatgattaaagatccaactggctactacagtaacatgttgaaacgtattaacaactcacgtatctattctgcgttgtctggtaacatctctttagctggtgtatctagcatcatgattatgtctgaagacgatgaagctgagatccaacgtaagattggtggtaagttaactaacaaagcaactcgtgatatggtgtttaataacactagtatgatgatgattgttgtgattagtcagtcatgggaacgtgtatctatttacgttcgtgatattgatggtttctcacagaacagcttcaatgacttccgtcagatgaatgacaatgattcttcgatttctgatgtacttaaagccttccaacttaaccaagcaccatcgttctaaggagtttagaaatgtccattaatatcgttggtttcgttaagaaactattaccaagcttcagtaagtcagatctagaagctgacatgcaagcttccttagatgcaatcggtgtagtgttgactacattccacaaccttggtgaagtgaatgaaggtgctggtctttcttctaaagagaacaaagaactagttaagaacttctacaaagaactaggtaacaatccaaaaactaaagtgcgtttgttgaaccgtgataagatcggtaaagacatggttactttgtttagtaacgttcagactaatggtgagtacttactccgtgagatagatgatgctcttaacgatgtaattgtatctcacgcgttgacagcttacaaagctaacatcatgcgtactccagctcacttctacttcatgtctaagtttgctttagatatggctaactatatctatgttaacgaagcactagctgctggtcttaaagtagatggtgattacaaactcaataagaaacaaattgagatggtagagaagaatctttggatcttcgttaagttagttaatgtctacggtgacgaacctaaacactttaaagagaacttagatcgtgttggtaacatcactctaagtaaagatggtgctgaagacgctgtgactgcgtttaacactgatgagttagatatcactagtacagtacctaatggcttcatcggctcacctatctactctatacgtctagtatttgcacaatgggaagcagatcgttaccgcgtattgaaagaccgtaagaagttactggaattacgtaaactacatttagaagtattacgtagtcaaggtcaatctgatctttctattgagaaagacattaactatcttcaaaagcgaattactgatattgattactctttaagtaagattgaggatagtataaatgcataatgattatagtcgtttattaaccactggttttgtcttacgtgaagacacaccaaagatgttggttgctgaagattttattgacaaacataacttaggttttgatgtctatagagttgaaggtattaaggaactctattcagagtacttaagtaatcctattcatgagaactacatgtctttagtggatgttgtgtctagtgttataggacatctcactgttgaagagttctttattaaaggacaagctaacaacacaacaatcactcctttaactacttgtctgattgaagatgttttacgtggtacttaccacaagactcatttgaaatacgcagtagctacaagtggtttgaagttatgtctattagctaatttaactaacggtgttaagttagagaagcaattcaaagacgcttgggagtctaatggtaaaccttcgatggttaacttactcagtggtatcattgcagagaaagaagtctttgtatcgttccttagatatgtcttcgttgactaggaggtactgtgtttaaacttttctctatggaggactctaacacggagtcctctaatgacttgttgatagataagatcattaaacaaactaaacaacctgaaaatcctttatcattaactacagatattcttaaacaacgtcaacagttagaagtacagattagtgagcaattacagaagagtcctgactctgaagaatctgacactactaacgacgaagatgattctggtgatgaggatactaatgaggatactagcgatgaaggatctgacagtgacgactctgactcggaagactcagaagagagtgaagatgaatccgagactgatgaggttgacgatggtgactctgaagagactgatgatgaagatgatgaaaaggacgaagtagagaaagatgaggacgacacttctgatgctgaagaagaagactctcttaacgatttaatcggttctgctttaaatgaaaaggacgactctaaggataagaaagaagacaagaagaaagaagttgctaaagaatccttcaagtctcctgttcctaagaagaagaaacatttgaaggatatctttactcctatcgttaaagagtatgaaaactacttgaagggtatgagtcagtatggtatggagagtgaagccacgcctattgagaagcaacctatagtctatgtcaaggaatcagtcctagagtccttagacaaccttgtagaagcttctagagtgtatgttgagaacaacgttaactttgttaacaccgctagcactgcaagtaaagaactcaacgaacgtttgactatctttagtcagtatgtagaagctgagaagtatcactttacacatcaactggtagatgataaagatatcttaggtatggttgctaacactagtactgctgaaccaagagacactgtaaaggttcttttgaagtatgtggacaatgtcaaccaggctattatctatgctctcggtaatagttatgataatcttgctagtagttttggtaattctgactttgaattgaaaggtgatgacttagtatataaaactatgttacctggtttcaatacagttcaagttcatttggaagaataccgtaactatttatctactaatgttcaagaattcgagttctataaactcaaggttatgaagactgaggatctctacaatcttaaatctatcgggttgactgaagataaggatttagtgtatctagttgattctatgaataaactgtttggacgattgatttctacagtagataatgtcagtgatgtcactactaacttcaataagttaatagatgaggttaaggttattcgttatgatgttgagaaaggtaacggtaacgatctaactcaaattggtattgatgctaaagttcaagacttcattcggtttaaattagcgatagaagcattctatattaactacaatttaatgagcgattatttagtcggattatttagtgtgcttaatatagtggtagaccttaaagaatagttaagtgttcgttttggtttaaaaagaatctattccaggtgggatagtacatccgttaactttgagagctcttaaaagaagacgggtgttcggttacattaagtaactatacgtatagttttttaacgttttgaggaatatagcatgtctaagaagttatttgcaatggaagaaatggacaacgaaatctctgatgtagaattagaagttggtccagaagaaggcgaagttgctgacgttcaagctgaaatggaagctgaaattgctgacgttgctagcgatgctgacggtattgaaaacgctgaagaagctggtgatcaactagctgaagttggtgagttagtacaaggtgctggtgaagaaggcgaaggtcttgatccagttgctgctgaagctgttcgtatcgctgttgaagctatctgtgctcgtgttggtgctgatcctaagaaaatgggtatgtaccacctgtacgctactgagaactttgcttctacttcttcacgtaaagcaaacactcagatcgctcttgaaggtatcaaagacttcctgaaagaactgtgggctaaaatcaaatcagcagtttctaacctttggaagaaagtaactgatttctggaacaagcacttgtcttcacttggtcgtattcagaaagctcttgagtctatgaagaagaaagttgctgcatctaaaggtgagttcaaaggcactagcatcatcgagaaagctcctagtggtttagtaagcttgttccctggtgaaggtaacttgagccatggtcgtatctcaaccatgatcaaatctcacgaagaagcgcacactgcttttggtaaggttgctaactctacctctaagttgggtgatgatttaatcaaagcactgaacgcagctactccagacgaagctagcatcactgcagaactcgctaaactaagcgtaagtactgatgctgttgattttggtactgaagcatctcctttggttggtggtgttcattacaagtacgagttcgttaaagacgacgaaaacggtaaagtaactgttactgtaagcactgacaaagttgaagctggcgatgctgaaccaaaaatgactgctggtggtaaagatgatcttaaaactatcatcgactcaaccttagctgttattaagactgcttctaaagttcgtgttgaacttgacaagtctggcaaagagtttgacaaggttatgagttctatccagaagtacattagtaagctggatgaaactggtcagactagcgtttctaatgctcttaccactatccgtggtgttaacactaacctgttgaccttctctactaagttgattggtggtgatgttcgcttggctaaaggtgttattggttacgcaagcgcttctatgaagctgtacaaagcttaagtagtaacttgattagaaactaccgggataaaacctggtagtttcttttctacatgttcgaattgtttggtatttatcaattaggagcctatcatggctaagaagttatttgcactagaagacttagaaaacgaaatctctgacgtagaaatggaagtgtctcctgaagaaggtgagattgctgacgttcaagctgaagtagaatcagagatgggtgatatcattagcactggtgatggtattgaagacgctgctgaagctggtgatcaacttgaagaagttggtgagttagtagaaggcgctgaagaaggtcttgatccagttgctgctgaagctgttcgtatcgctgttgaagctatctgttctcgtcttggagctgatccaaaacaaatgggtatgtaccacttgtacgctactgagaacttccaatctagttcttcacgtaaagcaaacactcagatcgctcttgaaggtatcaaagacttcttgaaagaactgtgggaaaagatcaagaacgcagttaagtctctctggaagaaagtaactgatttctgggctaagcatttgtcttcacttggtcgtatcaagaaagctctagaagctatgaagaagaaagttgcttcttctaaaggtacttttaaaggtactagtatcctcgataaagcaccaagtggtttagtgtcagcttttgctggtaagaaaactatcaacgctgaagtagttactagttatattgctagtcattctgctgttagtggtgtgttccaaggtgttatcaataagacttctgatacacagttaatcgttattaagaattctgaagctggcgctggtgtgttcaagaacatccgtgataaagtagctggtgaagctgcggagttcggttctaaagatgctcctctgatcggtggtgtttactacaagtatgagtttgaagtagaagaagataaagttactactaacgtaactactgaaactattgatgacgtagaaaccgaacttaaaatgatcgctggtggtaaagaagatctttcttctgttatcgctaagactttagtagtgattgataacactatcaaagttaaaggttctatggataaagctggtaaagagtttgataaccacacttcagctattgagcagttgattaacaaacgtgaaggtaataaagcgtttgaaggtcagacagctcaagaagtaactaaagagttgcgtgataaactaaacgttattcgtagcgttaacgttggtctattgacgttctctactaagttagtttctgctgatgttaagttagctaaagcagtacttggtttctgtgctacttcaatgaagttgtacaaagattaaattgtgacctgaatgaaccaccgggggattacctccggtggttcttcctttattatgtagtccaagaattctgtgattaaaataaggagcttatcatggctaagttgttatacgataaagaaccacgtgaggaaatcattccttcactcactcgaaacggtgttactatttccgaagaagagatgtgtcaattagacgatgacttcgttagtcttgagaattacactgaatcttacatcagtgtctccactgtctatgaacatttagttgacaaaccaattaactttctagattcaggtaactttgtactttacaacgaatacattaagaacatcactaagaacttagacacaaagtctcctgtgttgtttatctctcaagaagcaatagatcatatgccttctgttgtacttaaccgtaagcttgctctagaaggctttgtagctgacatgtgggctaagatcaaagaactcttcaaacgcatctatgaagctgttaagaagttctttgcggacatctttactcgtatgggtagaatgaagaagaagcttaagaacctagagaaagttttgggtagcactaacaaagacattaagactattcacttagataagatacctggtggtttagctagttcttatccggtaagtggttctgttaattacaatgctgtaatggaagtctttgctaacacaactttaggaactactgctttagttaagattaacgctgaagctaagaagttagctggtgaagatatactagattctagttttgttgcagatattaaagctttgaaatctaagtctgctgcattaaaacaagaaacaggtaatcaacctacagacacaactaaaccttcagaaggaggttcgttaactgatgcttctaagtctatagatgctcctgttaataaagctgagagtgatgctatagagataggtagtaaagttgagaacgaaggtattactaatagtgatagtgatactgaaggtgagaacaaagcactcgctagctttaaattgttctctaagaatgtagctgataccttagaaccattgaaaggtaagaagttaatcaaaggtaagattatatctgagattgaagtagatgctgaaagttctcttaagttcgttataactactgagaaagataaaccagatggtattaacttaggtgataaaactgagttaattaaattgatctctgctagtaataagatctttgaagggatggaatctgttgctaaaacttttagtgaagttaatgactctatctttaagaacttagacgcagtagataagatcactaaagacattgacgctattcaaatagagtctttaggtaagtatcgtgctgttcttcagaagaagatcaagactcgtcttaacttgatgaagaacttctttaaaggttacaatgaagttaataagaatatgttcagtatgactattgacgctattgatggtaacattaattacactgtgttatcacttaagtatttcggttaggagtagatgtatgaataagttattctctatggaggaatactctaaagaagaagatgttcctgtgttagataataagactgtagacatgggtgcagttttacaaggtactgatttctctgaagagattgaagatgtagatatccttggtgaaatggttactgagtctattcagatgtgttctagtcaaatgtctttagctagtgaagctgctaacgatcttaagaatcgcaggttaggtagtgtagactatctagtgtcggttgagaactataaactaatcactgatgttctagctagtaacttaggtgtcaaaccttttgttccttcattagaagactttggtagtaagtttgctttagaagcttctcatcaggtagctatggaaggcttccttaacttcattaagaagatgtgggataagatcaagaagttcttcctagagttctttaagaaggtaggacagttcatcaaacgtatctcaggtgctaacctagaaatagacacttatgagaagtatgttgatgacatcatccgtaagatcaaacgtaaacaattagttctaagtgacaacactgttaaattagagagtcgtcttccttctttagtggcagagttaaccactagtgaattcaacgatgatagtgaagttcttaataaaactgagaacaagttgaatcgtttagcttatgaacttaagagtatgtacgatcctgttaaactaaggaacacagaaagttctcttaaagacgttagaagtaatttagatgatatcttaaaggaagccgtttcttcttctccagatgttaatctcctaaatgacaaattatctacagtagtacaacaacttgttggtgtagttagtgcttactatttacctgaagatttgagtagtaacgatgttccatctgaagtctacgaaaacatcttacgtgtaagtgagaatgttaatatcgcagacataaagattcgttctatggttaaaccaggtgatggtaaacattcattacctaaacagtttaacacttacttagctttaggtgtagataaaggcacttacattaaaactagtactgaactcaacacttatgtgtctagtaagattccaccaatcggcactatagataacatagagaagttctataagacatataaagagtttgttaagtcttataatgttaaagatagtagtaacatccttaaccgtatgaataaagatgtttctgaattaatcggttatatggaatccaaatatagtaacgttgttaacacagtgaacaacactgtttatgttcaagaaagaatggaacctttctacggtagtgaaacagaacaacaaataagatatattcttagtttccctgagaagatgactagaaacatcactgacaagaaaatcagagaacagatgtttagtgatatgaaaacgttatacactccagagtttggagaaataatggacatattaaaacaagcctctgagatctttgcaggtataggtaaaggtactgttcctttccttaatagtgtaaactatgattcttatcgggaatgtgaagaaatcatttacggtttaatctcggcagaattcttgaagggttcagataaagctagagtagagagtgatcttaaagatcctcatttcttaagtggttatgttacctatgttagatggttcatgcaggaagataagaatgttgctaatgacattactgctaatctacaagccattatcttgaagttaaacaaatacttagaagataacttagctagcgttggtaatccaactgagatacttgagattcttaaaactatccaggaagcagttattcctttcttaaacacttacaagagtcacgttacttctgtagctactgacttaagtgctatctacacagaaacgcgtggcgctgctattaaatatatctatgactcagctcgactataccactagtcgatcacactcacccaggagcaatcttgggtgggtatcttatcactaggaggttgtatgcctgttgttagcgtaatcttggatgaagtggataagtctattcacactaagatagaaggtaagataataaacgatatagcttctaagatcaaactaccggatgatatccttctcatcaaacacggtggtaatgatttagttattacagatgctaagggtaaccgttctataaacgaagaccctaacacccctacaacgtcgtctaagaagcgtatgcttgttaccgtgagtaatgagtacgaggaagacgatgtagcctctgctgcgattcaccaacgttctgcgtatcctatctttctagataacgatataggtttacagatataccctatctatgttcgtaacgttttaaagattgagttctcttatataactaactctatgtctgaagctaaacgtattagagattacattcgattaggattaactcaaactcgtaacgttataatgcatgatgttgactacacggtcatcattcctaaagtagtcgaagatttgatagctgatgtgtatgatttaaagtctagattacatccggaaccactagagaactacttcaatcaacacgcaactaaaagaatgcatctcattactgatatggctaatgagaataacaaacgtttggctatagatgagaaacaaactcgtatcataggtagatttgagttcaaccctatacctgagaaggtagaagacgatatggatacaagtaactataagttatcttttaactatgaagttactatggatatccctcgcgctattgtaatgcgttaccctgttatgatctgtaacaatttgatgccggataaatacctaggttggatctccgatcataagcgtaatagttacattgaaaagaacagacctcataactacactagtattcataactacaatctctccatgttagaatctcaccaagaagctgagaagtacgctgatctcgagttacctatagtcatacctgactttgatgattttgaacctacgtacggacataaaggttatgctcttctaactagtcttctgtccactgtagatgaaggagataagcgtggattgtttaacctgaaagatttaggtgatgactaccatatcagtaaagagattatagactatctaattaacgtagaatacaagtacataacgaaaccatatgcctctttcctatatatggggttatggcaagatgatagattctacgatgctagtgtcttgtctatggataaagatcttaacatagtagctactcgtgatctagagttaacaagaccagtaagagttactcttgggttgtgtgttgatttagctcacttgaacgaaggtgctattaaaaggttgttagagtatcatttccttaaactagaagaatacaataacactatacctaaacctgattatccttttaagtctataatagaaatagttattagtgagtatattagcattcaaaacgcggtaaagtataacttgaatgttaacagtattcctggtcgtatcactactgatatgttagtggagttaataagaattctattaataagaggtgatatcgaaacagctactaaattactagacatcattaagaattcccctggagttacttataatagggtagtgattcatttacatgaattttatcctagtgtctatatagatttaattaaacaaggtttgttacctaacatagatccttctaaagtaagtcactctgacattaaacatgttggtgataagaacaagaagattccgtggggttggccttcatggattatcattcctataagtaacattaattaaacagtaactctcctcctggtcacccaaggaggagagtctttaagggatgttttgattagaaactttagagggtagtcgctatggctatagtaagacgcaaaccagatgttgaattaccaattgaaacaactatacctacagtgacgcctaactcacatcagagtaatttcactgatctagttcctgtatctcgtatagaatctttacttaagtacgttgaaggatatccttggacagttgattactttggtatcattagagcagctggcaatacaatagaacactttgatccgggtactcctaacttgattcagtcttactacaaggtgaatcagttaatcatgcatgttagttcaccacttagttcttcttacgatcagaacacaggtataacaactatcaacggtacttcactgatgccgtttggggttactcctaacgtaggtgatttattcttagctaacgtagatacaggtgaagatgcttacttccatgttacttcagttagtcgtaaacaatatactaagaactctctatatgagattaactataacttacacatctataactctgacgatgagtcttttggagctactctcaatgctagagtaaatagtgattacttctttaataaagacagtgatcatttcaaccgtgacttactaatcaaaccttctgttaaagaagctatggatagactcaaagtctttatggtcgagagtcaggactattacttcagaaccttcccacagaacagaactggtactatcttaatacctggtgttaagaacactttgtttgatcctctgttagttgagttcattagtaagatagtttcctatgatcgtttaggtaatagtcgagtctatagtcacgctcacaatgacaagtatgttagtcagacttctatatgggatatgttagttactcgaagtttaagtatgttaccagttactcataagaaacaccatttcattagaactggtttacttaagagtagtgctcgtttaggcactgtagttcatactggtgttgagtatatattatatcctgttgatccggatgtgggaactaatgtaggtagagatagagatcctattctagacccttcagaagctcctgtagcgctctctgacactaattactttatagatgacagtcatgtgttagaaactactaacaacgacgcagtgtacgctaagagacttctacatccactctttgaaaacgactactatgtggttagtgaaggattctataagtacttagaagataagtcagagtttgattcagttagtttcgttgagttgttaatgtataagttcttgaaaggtgaagctatagctagagaggatcttgctttagctatacagaactatcctagttggtctttacttcatcagttgtacttactaccagtgatgtggttactaactaagactcagttaaacagtatgagattgtaaacatgttgtaactctcctcctggatcaaaccgggaggagaggtatgtttattcaacttaagtgaaatctcttgataggatacatcacaggaggcttctatgtcattttccagtcagtacgctgatagaatctggaacaaactatacaaagtaaaaataccagatcaagcaagtctatctccggagtacattagaaggtatggtgtctatacttctaatattcctgaaataaagcaaatgatggaaactaacttcattgacgttatgattccaactagtaaagtgttagaatactatatggatggtttagagatacagattccgtgtagagaagatatgatcactatgcataaagatattgagttgtatcttgcagagtggagatatcacttaaagatggagataaacgtttctactgataaaagtaaagacttattacttgcattagagagattgtctaagtacatctacgagaaagctaaaccaagagaagtaattgataacttgttcgttaagaaacagtttggactaatgagtccgatacaagcgagtattgatgagcgtaaggaagttagcaaacctgactaccacggtatcagtgacttggtgagaagtaagagaagtaaaccagtaagtagattctaaaagagaacctctaggattgagttcctggaggttcttgtattgggttgtactttacttacatatataacacttagagactattcagaatacatctgatagtcaattaccaactgaggaaatatcatgcaaactattgataaagaaccgatggaaatgttaaaagctatctttgaatctacagacggacaaatcattccgatggatgaatgggataacggaacaggttatcttgataatgctgttaaaggagattatgcgcctatacttaaagtaggacaatcgtgtagttcagtggtgtccttaggacgtttagctgtaatggttggaactgtatatggtaacatcgtagtgttccaacgttaccctggagatgttagaccttatgtagtgtccaacgtacccagtgagttaaaaggaactttcactaatcctttaaccggagatagtttagagttactatctaaaatcatcttagataagactggtcttattgtagagaagttagcaggagtacacgtataatgtctgatacatatttaaagtgtgacgattgtggtaaaactaaacacacttctgtttggtatccacataaccacagtacagctactgaagacttttcagtgaacatctgtatggaatgtgagaacgaaccaactcaccgtggtcgtgttatctgggatcgagaagacgccgatagcgaagaacagtgtcgtcaacacgaccgagaactagactaataaaaatactacccctactacagagtaaaaaatctatgactaatataacttacggtaatacctctaatctttctacgtatgaattagagtgtgctgaccattgtgaacacgtagaggaagatcaatccttaggtgtgaagtacagtatggaatctgattcctttggtcctgttggtgtctacattcaatgtgaagaatgtttcgaacgcactaaagaacaagacagacataacacttgttatgattgtggtgaggataagaagactactcagtggaagtggtatgatttctatgcagctcaaggcgatgaagctctagaaatatgtgatgattgttggtctgaacctaaacacactcaacgtagacagaaagattcctacgatgaagatcaagaaaacaattatcaagctgaacaagacgacgagtttgacgattaactaattacccggaacacatagttccgggtttcttaaggagtaacaccaatgccattccaagtaatagaacaaggtaacttagagaattcagatgtatatcttttctttaaggatagcaacgaaccctctcacacttacttagtaacttcaattagtggagaaattactctaaccgggtttgatgaaacaggtcatgttgactgtgatttagaagaagaacacatcgaacttctagagagccactttgatggactataggtactatcatgaccttctattccaagaaagatgtttatgttgttagtgttaacaatgtaaatagttggacttatttgatgtatcaggaaagcactggtctacttttctacgctatcttagtatacggtaaaggtgttagagttcatccttataaaccagtaggtggtaacctaaccatgatagttactgagaaagtatctaacgaaacttacaacaaggttttagaggctataccttttgctatcttgaaactaaataaactgaacatagagactctgtacagataaatgtaatacctaaaagggagagctaactactctccttcctttttttcttccattccaatactacattgttttttaatatggctacaatcttttgaaaaacgttgttcttgatcttaactactcttaacactgtggttactagtagagtttgcgaagcatagaaactctacgattgtatatgccctagggaataccccccaaagcgatattataatactctctttttccttctatagacttaattgtctatagttggatatattacgttaactttcttaaagagaatataagacacttagaactaaaagaatacacaactctcataactctatagtttactacgtataaaagaatgtttacagctaacagagtttatattaattcaaagtaaagactgaaagaaagaagatacacttaaactaatataccgataggtaagtaagctcttaagcttatttggtaaccagcgatttggttgcgtggcgcggtgcttaatagttctcttaaatatcattcaggaatacgtctataactccctacaatgcgtttagagaagagtttagtatatcacacatacaaagttccatctaaaagaaataaacctcttagaacgtattacggtaaagaacaagagaagagaccgaagtcccttcccttagtctatttagtcgttaccataaccatcgaaaggattacaagttgaaacgaattgaaagaaaccttgctcttcagcattacgactcttaaccttccaaccccaacgaatccttaagttacgtttcttactccatggtttaaccatatagaaaccaaacgcaactaagttacctttcttatcccaagctttagtcattaatgtaccagggattttatacttatcactgatatccgaattaccttcttgagtgatagtgtaactagcatcccatgctatccctaagtaacgagctaagttgtaaagtggattacgtatcatccacatcacacggttgatatatcctttaattccttctaactcattagggaataaacaacgtttcttaacatacccttcatcaccttgtggtgggttatcaaacgttccatagataccaccccaacgataacgaactttatcgtggacgtctggtttagtgtttatggagataatgatagctgcgaaaggaacagttattagaagtagaattttaataataaatgagagtgtatgacgagcaattagtttgaacatatagaactcctttagttcagttatagagtatactcaccgcataaccaaactaccaccacccttagttaaataaaactaaaagagacatggaatggatgacctaccgtggattaacttagagttacatatatagaatctatgattgggtaatcaaattaaggggtctatttttaggagtttaagtaatggctacaaagtttgagtttttaaagatgttagctcctttcaaagacaatcaagtagttatctgtatggatagttctggtagttgggataacatcattgaagtagttaaagacggtggacagatagccatacggtttggttctagttctagacgtttctctaagttagacctcattaaaagtttagaacctttccacgaagactcttgtgttatctgtaaacgagagaacgatggttgggataacgtagaggaactaggtgagattgacggtatgactgttattcattttggaggaggttctccttttagttcagaaaggtaattagtatgtctaatgtaatagtaggaaagaagtgggataagggagcaatctacattggtagaggatctgtcttaggtaatccttttgctatgaaagatatgtccgatgaaactcgtgatgaagtttgcgatcaatacgaagattacttctacgaacagattgagaacgatcctaagtttctagctacggtagagagtttaatactgaaagcagaaaagggtaaagttatactaggttgttactgcgcacctaaacgttgtcacggtgatactatcaaagattacattgatggacacttacaggaaatacctgtaaacatctatatgggaacgaatgagaatcctaacctaagtaatctagctcctagaaagtttaaagataaaactagtaagttggttttcttttcagttgaacatgcttaccagtctttaaagagtggttctttagaccaagagacttatgacaaatatcaggaagggaagagttataagatccctggtactttaggaacactaactaacagtggttggaaccttaagttgatggaaagtcttatcatgcagtcctttgaacagaacaaagaagctagagaagaattactagctacaggtaccagagagttaacgcatactcaagagaaaggtatatggaaaaaagaatttccacgtattcttatggaagtaagagataaacttagtttacgaaatatgagtctatagttcaatagtagaacaccatgcttttaacttggagatagaggttcaaatcctcttagacttaccttacacatacattaataagcgcccttaactcagcggatagagtaccttccttctaagaaggtggtcgcaggttcgaatcctgcagggcgcaccatacattatagaggtctttatgacacaagaagaagtttactttgatatagtaaaacgatacgagcaaacttccgaagaagagctcttaaaagaattaacacgagtagctaaccatattaaagaatacagaaacatgttctctaaagtaatagctagtaagttatctatgcacctgctagctaccttgagtccgttgttagatgacagtcaacgagatgatttggttcgagaccagacagcgcttaaatacttactctacactgaactagtagttagagtggctatgggtgcagaagactatgttactctgtctcctgtaggtagaatggtttgtattcttatgtcacaaagaactacacgagttacagatagaaacactagactaagaaggatgttagagttagttaatttaaattcattcagtgattatatggaagaacaatacaatgaaagcgtgcttgaattaaactatgatgtaccaacggaacatgtagtccttaagaagataactagtaatggaagtattaaagtaaatagattggacttagatcctaacaaactacttgacttccacacagttaaaatgtttaaagacatagagacattccttaaactcgagtcctccaggtagagttttaggagttagttatagtggttcgctaaagttattaaatacacttaaacaatttttgacttagttatttaatagcttccactataacgaccgtagggtatccggcttcctaagagtgatgttgttgcctccaagttactcctgtcgttactcttaggataagtctagcactgctagagagttagttattgtttagtgcagctcatacccaagtgggactagcccaaccttaatacctcgacgttctctttacgaggtgggcctaatttcctccgggtagtgctagcagcttcggctgctagtgctatttctttttcttttttcctctttcaatccaatgacactataacaggagttctctaatatgaaagtcccaattcttggtatatcaccaaacataaacataactaccgataaaggggttgtggaagttcgtaacttagcttgtgctatagaagtaggagttaaagttaaacctattacaccgtacaaattaaagaacagttctggtgagtgggttaacgtcgtaagtgtaactaaccttggaacacaatacgtaagagactttattgtagaagacggtagatgttttgtagttggtgataatcaacgagtgttaactaataaaggattgttgtctggagataatataaagacggatatcgagattactttacaagccgaaggtgatatagactatcctcctgtggagtgggtagaagggtttccttcgtttcctttagacactaactcactaagtactttaaagttattaggaatgatcacagccttcggtagagtgatacctgagttaggtgtgattggtttagaagatgttcagtctagaactgtagtggacttcactaacttaatggaaacagttttccatttagcgccagaagacatggtaaaaacaaaacagactaccaacaaagtttcagtacactacactcatgtaggtttagctagatggttaaatggtctactgaatcgaggtattccttgtgaagtaatgagagcatcaaaagaacaaattctgatgtttcttaaaggaatgtacgatcaaagatacagtcaaactcagactcctattaaaggagctaagtatgtgtactacggtaataaacctgtggttgctagacaagtgtttagtttgttgaaagttctaggttattctccaagactattaaacgaacaagatcacaagtactctgttctgactactggtgttaatatccatgaagatagtaagttaagatctaatctctataaagatgtaactactaaaacagttagagttaaagaagtttgtgggtatctagatgaagtttaccttatagagattgatcaaggtaataattatattgccgatggtttagttattaacactggagttatataaatatgtttattgtaagtagtttaggttattgggttagtttgatagtttatgttacgttattgtcaacactaataacaacttatcctaagaaaagaaaccgacacattgattctcgtatagaagaatctttctttattagaactgatctaatgggtaagatgacttattatgactttaaaaacactgtctacgttttcttatttgttatagctttaataccagtaatcaaccttataggtattggttacttactatggatgttatttacggaggactaaagatgtcagcgcacacaacagacacctccgctacatacctagatattaaagatataatagctaaccacagcgaaccttacagtagtactttcactatggaagttcaactacacacagtggataaggatcttagtaatctagatcacattactgttgtggagatgtcggttcttagagactatgtacttaacatgagtgactacattgaaatcactctactggttcctataggtactttcgtctatgacatttacccttacttaaataacatagaagttaccttagtcactaataaacaactaagtaaagatggtaaagttcaaaaggtaatggagcgttacaaagcagtttacttgttagataagaacaagaacaaaccaactatgagtagtgcttcaaaacaagaccttaaccaagaactaccaactaccctaacactacagttattagatagagctgtagaggttctcagaattaagacaactcaaggaagttttgatcaccgtgttagttctaataagaatcttactgtcgagaatttcattagaagtgttgttagtgaagaagctaacaaaatactcattgagaataaaccagtattagaacacatcaacatagaacctgtagataataaagaacctctatctggtctagtaataccttctaacacccgagtagttgatgtagtagacttcttacaagtaaaaggtaaaggtgtttacaatgctggtgtgggtagttatatacagaactatggtatagatcctcatcaaactagcaaaggttactatgcttattcgttatataaaccttctaagtatattaaagctaagaataagataatcatatactctccactaacgtctaatctatctatgacagatattacgtataagtatgaagagggattacttaagatagtttcacacgcaatacctaacattgacgatctaaaagaatcgaatctaatgtctacaggtgttggttaccggatggctaacgctgcttcctttatgaagaaaccagttgttataactgaagatggtccggtgtttgatagagcaagacagaatactgagatcatatctaaagacagagcagatggtgttaactatgcccctaacaaaggtatcagttctaatcactttgtacacactagcgagatcctagagaaaagtggtagctacattactgttgagataagtaacttagatcatgagttcatctatccagcagcacctgtgaagattgtttataacggtaaaaataataaagtagaagaactttatggagtcattcacaaagccgctatcaaatactcaactcctaacttagacgtagttagtaacattagtaagggtgcggttggtttaggttcctttgtagtattatatatttttgtagaggtataaatgttggaaaagattaaagatgcttttaagaacttaactattaaaaaacatagtagtactttggatgacgacactggatctagtgaagatgttctaaagtctcaggtgaaaaagttaatacgtaaaagtcaaaaaagaacaccgtttacgttagaagacattaactttctactaaactactgcttcggtgaacctaggttaaagactaccacgtttaaattccatgactcactagctagacatatggtttttgctatcagtagtgtttatataattgcagacactgatgaccatgtaactggattacgttttggtatgcgtgagatattattaggtaagactgttaatttagacgtatctcttagtgatcttaacgaactgatggttcctgtctctattaagattgattctaaaaacttacattaaccggagtacattcccaatgacaaaagttgaattagtacaacttcttaaagataacttagctgacaacagattggttgctgttaagttattcttagaagatctaatctccagaaacacacacggtagcggtattggacaatacagaatgtatactactactccttccgttgttcctggacaagaaccaacaaagaactacattactagtgtagatgatttcttaactaagttagattcggaagaattaactgcagagtttatgtacggttctttcaaagcaaccggtcgagtaacaccaccgatttctaccacacctactaatatagtagtagagttagatcatcactccgaagaagataacttatatttccggtactggggtggatctactattaagaagcagattagttttactttgtcttatatgaatgataacgataaagaattacctatcaaaattgttaacgtagctctggggtaatttatgactatccttcacattaacaaacactatagtttctctgtatatgcaaactctattctaggtactaactataagaatgctaagttagttgctattctagattatagaactgcattacggtttgagaacatagatttagtacacaaacaaatatacccctacttaccacctagcactttgattgatcatactaagtataccttctacttgtttacagtagacgataaatctgttgttattgcagacacttggattaatcaaaatagcattgaggagactactggtcaatcttacactgttaagttgaacaacgtaaccactcatcagttgaatatcattagagatcaactgagactcattggagtgtcgtttgacatcagttaggagcaggagtcatgaataccccaacacttttagagaaaccagaaaccattactaagatgactactgtagaagcatttactacagcaccaggtctaaatcctttcttctttttaacaagacagacttacagaacttttaaagatcttaacattgacattaatgaatctttagatactcgtaaagttagtgatcgtcttaaagcagaaataagattactaaataacaatgtattatctagcttactttttgataagatcctttacgatgagtttgctaatctaactaaagaagagttatctggtattagattagaggtcaatgattacctgttagctgaatgtagtggtgaaatacataataattgtagtcacgatttcaatccagaatcacgttcaaattgtccattagaaaaatactatgaaattacccctttaaatacaaacagcgggaccattttactcgttgtggttgatgagggattcctaaggaaagtaactggatcaaaagaaagtttctctgagtttctttcagacatcctagattacatgtattccattaaatcattacctactaatatacagcagatagttcaaagctacctgcggataaataataatgaagatctcttgactaggatcaaagtctccctgagatcaaccaaatagaaacattgatcaatttttctttccttttaatgatggagcaacaatatgtcttttagcaaacttctaccgggtcgtaagcatagcactttcaatccaattggcgaattgtccgaaaaagtatcccaggtaactgcttcacgttcaatgaacgacaacgctgttggtactatggctatcgcttctgagtctatggattcacaaagccaacaacaactgtctagcttctacggtaacatggaatcatctatccgtgctatcgctgaagattttgatattgctgttgaatcacaccaaatcgaagcagctactatggctggtgtatttggtactaaccctaaaggtttcatgaccactaaacttcgtaacccacagcaaggtgctgtaatggttcagagttcagtagttgatggtcatcctgagcgtccagttctttctactgaagcttacgacgagcgcgctaaccgtaacgcacagatgcagtcaatcgtttataacttattggcttcacgtcaagatgagttcggtgagactttcttcccaactattaacatcaacccaactgaagttggtatcactctgtcagtaaacttgttctatgtttacaatgacttcaaacgtgatgtaactggttcacttgctaactacgctcgtaagaacgtaatccgtgcatacgctgactcagaaattctgaagaacgaattgactcgtgttgttccagttcgtcgtactggcggtggtgctgatgataaccaagcagtgttcgctgctgatgctggtaactggtcagtagacctaggtactggtattgttgttcctactggtgctctgaaagtagacactaaagttgatctgttgggtatctctcagactaacgaattgttgaacagcggtatcatgggtccttctgataacctagatgctcacatcaaacttgagtctatcttcgttaagttgaccaaaggtggtgattctgaagttgttcagatcttcactgataacctacctgcttctactttcacatacgctccacaaggcaacactcgtcgtatgttgttgagcatggatactgactcagtagttcttgataagaacctgaagactgtagctggtattgctcctaccgttcttcctgaactagcatctaacagtgttcgtgttcagttgactgtaagtggttctgttgtacttgataaaggtgattcaatccttaaccgtggtagcttgactcttactactatgcgtaatgctggtggtgctctggttactggtactggttttgatgacgttgcagctgtaattgatactgcagagatcattggttacaccttgactgcattccgtgctaacagcaacatccgtcaacgtggtcagttgttagatggtcagtctgagtaccgtgtaattactgttccttaccgttcacctatcgcagctatcatgccagttaacggtggtgctaacgatacttcacctctacagaacctggttactactacagctatccgtacttctaacgatgcagttcatgcactgttgaaagcagctgctgtattgaaaggttatgctcctattgctaacgcagatggtagcttgccagagatggaattcatcggtcatcactacgttaaaccagtgttctttgaagagaccttggatctgtctaaagtagttgatagcttgagctcacacgagcgtgctaaagatatccgtgctgccctagttgagaaagttcgtttctacgctaacggtatgtatcgtgagtctgagtacaaagcagcagcaacagttctaactggtagcaaagacttcaaaccaactgtaatcattggtactgatccagttcttgctaactacatccaacacgatggcgaccttcgtactctgggtgagaactttgatgttaaagttgtatctacaatcgacagtcgtatgaaaggcaaactgatgatttcattcggtgtctttgatgcttcacgtaacactgttgtaaacccattgaactttggtaacatgttctactctcctgagttgaccttacagttgccagctgtttcacgtgacggtgcagtatctgaagagctgatcgtttctcctcgttacctacacagcgtttcactgccaatcatgacagtgctgactgtagagaacctggctgacgttacttctaaagttactcgcttcactaaagagcagtaagttgtaatgtgatgtaaatagaaccaggtggctaatgtcacctggttctttcacgcattgtataaattaataccatggtaatatagtagagacaacaacccaacaggaagataacatgctagataaaataatcaaccattatgttgaaagtaaaaacactcaagaaaacatcaatgtgtttgtagaaatcaataaacgtttcattaaagaagtacaagaacgttacgctgtagtcattgtagagttcatgcagaattttgtatttgaacagcagggtaagattgttctgactgttaatgtacataaagctaaagagttagggatgaaaacagatatcctagacctaaccgctaacactactcgttctatcgctctagaacccactacaggggtgttttcttttgatattagtatcaatgggaagggtggggtctataagttcaactctaaggacctagagactattgacgtagtagttttaaatgacgacgatgaagtagaacatatccctttagagttagttctaactactatccatgaaaagatcatggcacctaaagagaatgtacaagtagtacctgaagacttacctgctaacgtagtgcgtggtaactttggtaaatagacaacaatagacctaggtagcttgattgctacctaggtctttacacgtattggaagagaacataacaacatatatactaactatagaaggtagtgtattctttacttggagtacctctaaacattaactctctcttgaaaggagataagtcttgaaagacattacattaaaatctagaatacttggagcctactccttagagggaactggtaacatgtcaaggacggagaaaaggtttcaagctactgctggtatgagtggttatttacctattctaaagttaatcaaattcaaccaacaagaagaagtacgtttaaccaacggtagacaaacaacacaagacatagctacttacaataagaatagaggtaatcaaaacctatcccaggaagttattgaaacaaagaaaatagatataactgagaacgatattatctgctcacctgtttctgttgcgttcaactttactagtagcgatattagtatgagtttacccaatggttttcgtaagacatttaatccactttctagtaataacttcagggaacatattggtaacttaattatactaactgtttattactttaacatcccttcatatatcaaagagaaaacacaacaaggtaattactttaaggaactagctaaagaaactgttaacgataaagcttctcatagtgagatcatgagagacatatatcactaccttgctaataacactcagctctacgatgaagatagtttcattaaagaagattcatgtatgcgagtagtcactataactgagttgaatgaagctgacttaactgacggagattgctttgatctaaacacaggtaacacctatagtaaagaaactctcttagggatggatgcaaaccctttacgtgatgatgaattacaccataggaaaagtgtgtttgatcacttagaacctagtcaagtgtgtgtctttataaatgactacgaagacatactaccaccacagtacattaatattggtggtgaagtcatacaggtaactaaaactagaaataagtataacttccaaggtcttatattaatgactaaagaagaaggaaagaaaccagtacagattcaagttccactagaagagctaggtaacaacaaatatgtttattctagtagagctgaagcaaacaccggtgctaaccttaaagaagctagaagcgtagagatagaacagttaaaacataagtttgatatggagagaagagagaaagaagctttacatcgtgagaagatgcaagagattgaagtgataaacaaaagactagaagctactctgttaaaggaaagagaagaacacaaaatcaaagtgtcaagagaacaggctatgtttgatcaagctaacaacgagaaacgattagctttagaagctgagagagatgcgttagttaccaagcaaaaagagtttgatctggaagtagctaaaactaaagctgcgttagctattgagcaagaagaactaaagactaaagcagctgtagaaactatagaagctaagaaaagctatgaggagtatctacacgaagctaatcgttatagcgtagcttctaagaacaactatgagactggtaagtatcacagagactccacattagaaactatcaagaccataggttctgtagtagcagcgggtgctggtattgtgttcttgtacagtaagtttgctaaatagtttaataaaattgtaggaggaatctagtgcaacacacacctggaggaaacaaacatgcagtcgttagctagtttcataaaagaaagaacccctaaattcaataagcaattagtagaaggattgtgttaccatcgtcttaaagacgctattagttacattgatcagttcatacgttacagttgtgaacagaaaacagataccaacttacggtacttaggttttaaagaagtaacaccgcaagaagagttgaagttcctgttcaataaaagcaatcgagttacgtatgatattgctcgtaatgacatctacttagttaagttcatatttcagtatggagaagaagaagagattcgtgaatcttacttctatatgcccttcctagagaagggtaactctatgcatatgagtggtaataagttcttgatctcacctgtactcgccgataaggttattagtataggtgaacagatcatctttattaacatccttaccgctaagtatagttttaaccgactacaccacaacgtttccgttgacggtgcgttccgaagagttcctcttgtgcttggggagttgtataaaaatcaggtaaagaaactccaagataccacaaaagcaaaacctactatcatgcattacttgttagctaactacggctacactaagacaatgcaaatgttacttggatttgttccaacaccagtctatgattacactggaagtgataaggtagttattgctagtacaggtttaaaaccacgtgggtatattaaagatgctagcatttatgaacctactaagattaagttcttaatagatcatagtcagtataatgaagaagtactttattgtattggtaatctttactatgtcttggataatttccctgatcgtatttctattgaagagttagataacacaactatctggagatggttgcttagtgagattattcacacaggcttacatagtcttagttatttgaacgaaaagatcaacgcgcactttaatgatcttagtagtgactttgatattgttacacgtaagaaacttaaagacattgatgtagatgtaactaacttaatcgagttgttactagtgatctttaagaacttcaacagttggatgttgacttctaacgaccgtaacctttatcatagtaaaacttatgaagtagagtcttacgttctaagctatctaacctcacgtattacacgagcagtgttagatattaacaaagaagagatgcgcactcaaggtggtcttctagaaagtaagactgtagacaagatctttaagaagtactttggattgcgttcagtctttggtattcgtaaagagactacttttgttagtactgttaactacagtggagatcacttgtactttaagagaacttctattgtatctgaacaagaatctgactttgtaaacgtaggagtgaaagaaactaacacttcagagcgtaagaagattgttgctagcatggcaactataggtagtatccttggtttgtctaagaagaaccctacaccacttatccatttaaacccgtactgtaatatagactataactcaggaacagttctacctcatccgcagtatgataacattattgagtctacagataaactgttagctaacattggtgttatagatgagatagaagatttagacacattagattctagcttcatgaatgagtttgaagacgatgaactagatgatgagtttgaagacgaacttgacgaaatatctgactgataaataactggaggcaacacaatgtatcagaacccacacactggcatcccagctcacccacaacagcaacaaagacaaccaatgacacagcaacaacagcaacagtggttacagcaacaacaatggatgcagcagcaacaaatgcaacaaatgcaaggtcagcagtttccgcaacaaatgtatggtcaacaaccgatgaatccacaacaacagtggatgttacaacaacaacaaatgcagcgtcagcaatacccacagcagtttccacaacaaggtcaacatggacaacagttcatgcaaccaggacaacagcagtttgctaatcagtttcaacagcaacaacaattcgctaatcaagaagtgactggacgctttggtcaaccgacacacggtttccaagacacacccttaaataaacctacagctaatcgctttgggtctggaggcaatcaaatgcaatcacaacaacaacaaccgattccacaattccaacctgcacagcaaccaatgcagactcaaccgcaacaacaagttatgtctgctcctttgagtaatcaaagtaactcgttagtggtagttcctatgaaacacaaacgttctgtaaactctaagttagtctttacaactaacgtacatcaagttacagagaaagacatgaacgctactagtttagatgaaccatacattatggaagaatctttaccagctatccactctttcttaactgagaaagtgtatgacgaagagtttgatgtcaaaccagttaacgtgtttgcagcattacaccgtactgtgtttgtagataagactttagtagaaatcattgacattcacttcaataagttaattgaacagttctataaagagttccgtaagttgttcgactctacagagactcgttactcttatgcagttcttgagtatattgatgatcgtcttacagttgaaactaacgagtacttatctatcaatagtaaagcaggtgtcactattgatagtttcgttgctgacttcaatgatctaatcaaactcttagctgagaatgacgagaaacttaacgagtcttatattgaacacatgagtgagttcctagaagacttccgagctggtaaagatctagttgctgaagtagaaaaagatatccctaaagaagataagcaaacttcagttagtgaagtagtggtagttgcttacttagatcgtcatgtacttgaaacaggtttagatgaagtaggtactgagttaactcgtatcgagaaacatcctagcaatctgttcttgttaagtattgtggaattagtaggtgagaaagatgcacttacttttaacttgatgactatggatggctgtatcttctacgtcactcacagtgaacaaggtgaagtatacattaaacgtgtataactaaagacatacacaccacccggctaacgctaggtggtgtgtactattggagtttaagattatgttagaaacaaagatagttactgtagaacaattaggtgtggatgttaagattctcacagacggaaagaaagttcgtttctggttaaacagtaaagtaggtagtgttccttcatacagtacacctctaaagaaacgccacgacgataaaatagcttactgttatttctactgtgataaaggaatagagataagagtgtaccaagacggtgaagtaatttctacttaactaataagaaccactacccagctaacgctaggtagtggtttctttttttcttttcttacaagtaacttaccagtttagatcagcttcgttttcatcaagatcgccttcctcaccactatcatctgtagtggatgtgtctgttgatccctcaccactaactccaccttcaccatcctgagctatacgagctaagtcagtgtcagtagctaacttatacttactcatcaagtctaacaacttagtagagttacgcatagtgctagataagtgacctgtgatgatgttaaggataggttctacctcctcttctaactcactagtaatgtccaatgcttcagggaagaagttgttatctgacatccacttacgtaacaagtagttcttatagatacttctaacagaatcaatcttacctgatatctcaccagccacttctgatgggaataactcaggagaaataatagactctattaccttatccaaaccatcacgatacacttcaaactccatcgacaagttagcgatgttagtgttatctggtttaggtaatgagatctccaagttatcagcaatcacgtcaatgtagtactctaagaaagcttccttatccttagctaacaactgcttctcttcttcctctaaaccttcacctaaacgagctaagttatcaaccaacatctctttaatctcaccacgtaactcttcatcattaaaggttactatattgatgaacttgtgtagatgtttacttagtttattttggtagatagaaatgcgtttagataataggatattgttattaactacagtagtagcaaagtcaggagtaaacccactatcaatagtctccggtgataaacctaatgcaataatagtttgtttacgtaagtcatcttctaactctgaactaggtacagtgtgtgaaaggttagcgttctcaaagtctaacttgaggttaggtagtcttgggttgttatcgtaactaaactgtagaccagctctctgaatccagttaacgaggtctactgggttattgatacctaagggtaggaagttctgacgaagcttaagaacagagtcctggacctgttcaatggtcttctcaggatcaggatcattaggatctaacgatacgtttactttagttacatcaatagactgtttagcgtgtgccatgatcttagagaatagtaagatagcacgtaagctagatagaacagatagatcttctaacaaagacttaccagtaccaatgtctgtatattgaaacgcatagtaaacaactaactctcgtggtacatataacaagctagtacgttgatcggctaaagctcgcataaacattagaaagtaaatgtcattcttgttagcaatctctacgtcagttccatataaactagacttaatagaaccatagatctccttctcaagaacatccttatacatatcaaacaaaccattaacatctaggttagagttctgatcagatacaaggttgttgtaagccttctgagtgggagttaagctagcacctgggttcatactcatcatagtgttaacttgcttaagagagttatcaccagcctctaggttaagaggacgacctgactcatctaacaaaacaaagtaacctaaatgttcagcacgatcacctggaacaaacactggaatgatagactcagtgggaatcttcattaccataggacgacccatagacttacgagcagtagcgtctttctgtttaatgaactcaatcgacttaccagaaggagtagattgtttattacggaagatatctaagtactggatcttgtcacgtgtctccatagacactccaacaccaccacgcattgagttacgaatcaatttagagttgatgtcatctcgtatacaactaaaacgtaagatgttagtgttgtcagttacatggatcagtttgttagatactaagttattacaaataccttcaaatgagacttctggtttatcaacaccgttcttaataatactagtcatgttaatagggctaactagattacgaactaactgttcagcccggttgttgaagtcttcagttgagtaggtagtaactaagtcagagttaatgacttcatctacagaggcttcagggatgattacctgtacataagctcctgagtcaaacaacgcctcacgaatgatatcagggagtttatcctctaactcatagtgatcattagcgtggttcttaatcgtctctagaacgtctgctaagatagctggatcattcttaaagtctttacttagtttgtagttgagttgaatgtcagtcatcttcttaggtgaaagaatagaactcacaataacctgaatagctaattcgatatcagggaacaacttaataatgttcttattgttttccttgagggatttaattctaagatgaatatcctccaagatactacgattaatctcaaagttatcttcttcaatgttagaagcaacttcaggacgggatgttaacttagaaataaccggaatagcctttgggttactctcgatgatcttcttagctgcaacgcgtttacttttgttcttaccgatgatatctataagactattggggttaataggcatctgttttactcctgttgagtttcaaacgattttaggtatagtttaaaagcaatactagggaattgaatttagtggttactagaatacctatttggttaagagttttaggagaacgaatcatgcgtattaaaagttatgtagacggtggacatgccggacaaggtatcttcacttcacaaggtgcaagtcttactggtccattgattctagctggtgatccagtagaacctatggaagctactagtaagcaatatgtagatcagaacaatcaagatttaattagtcaaggtgttactgctgagggttttgttaaaggtggagttgcacctgctgtgttaccagcgtttagtggtgatgtaagtaacgttcaaggtagtaatgtatttaacttacctgagtcaggtgttatgtctggcacttatcctaaggtagaagttaatgctaaaggtttagttgttgatggtggttctttacttgagactgatatccctacgttaccttggggtaagatcacaagtggtcgtcctaccagtgttagtggtttaggtattgaagacttacttggttatgaaggtggtgagctaacaggattgatggaagcacatgctgatccagtgagccctaagaacccaagtactgttggttacattcgtggtaaagctgaaacctatcctgatattttacaagtaggagatattattgagaaaccaactatcgtgactccgtttgggtttttgaaagctaatggtggtttagttagtaaagaaatgtatgctgatttgtatgctgttattggtgataagtttaataatccactaattcagtctaatagtagaagttggtccgatcaatataactttaactttgagacaaatggaaatttagatgtatggactgaagaaactccttttccgtttgatataagatcatcaactttatttactgtaaacgattatgtatatataaagataggacaaaaggggcttcacctatcggatgaaatatatagaactaaattaattggtgggaatttaagtacctcgtgggaattagtggggacttacccgttaaaaggacatcattctaccgtagtggtttttaaggataaagtatacctaataggtaacggctggcagcaaactaccaataaaatttattcctctagcttaaatagcgatggatctatttcatcttggacagttatttctgaattaccttacccaattacagcctgtaaagctgtaatatataataaccgattatacgttattggggggtggactggtgctaattcttctaataaaataattagctctgcgttagattacgatggtaatttacttagttggagggaagaaacccattctcttgaaggtttaaccggagttggagtttgtcttattaataataaactgtatttatttggtgggtcaacctatataactgatgtatctccatcaaaaaaatgttactattttgagtttgatgaaaacggaagcttaggagagtttacacaagttgaagatttaccagaagtaataggaatcggtgtaataattagcaccaataaagaactttacttctttggtggcgctgtttctgaaatagtcgattctaaaattactaatgatctatcaaataaaatttataaaaatacaataaataatgatggtactataaatgattggaatttagcaggtactttaccagtaaaaatagatgaccctagacttttaataactagtaagaaactttacattattggaggtactgtagaaaatcctttagcgggaggttcaagagtagcaacctcaaaaatatattctactccctttcaaggaggtaaagataattataatcaatatttcaatgaaataaaaccaactgacatttatgattacaaatttagattacctgaattcatcaataacccaaaatctaatatatatacctacttaaagtactaatctccacaataacaccagagagcctccgggttctctggtggtttctttttcactctactctgaattctctgaacctattcccaagggagatttaatgtgtctacctccatcacagaagacatcctctcctccaatagactctatactgatacctacctaaagaacactattaacttaacaaagtctatagtgattaagaatgacaaagaagctcgtctctataacgattacataggacaagctttcccaactcacaaggtagatacgactaacagagctacctggagatattacaaacatctctctggacaacatcatccagtagacactcctatggaactcatctccatagacaacggtacagtaataccactcacactaaacaccatagctctcaataagaacacgcataaagaacttctacagttcagttattactatcaagaactagtggataagtatcctgatcaagaactactcatacgttctataatcactactactccaaagaaaacaccacaacaaatcatagacttagaagactacactatagtaggatacaactcccaactagtagagtctaacgaagacgagataatctataaactacaagacagaatcaataactataaagtaacacaactcttacatcaatacactacaacagactcactcttcttagcatctcagtatcacgtactctactcttatatagtaaccacattactatccctacgactagagaacgctaagacaccaagagcacacagttaccacattctaaactacttatcctcacatcactacttagatactcaatacagacatctaagtaaaagacaagctctctatctatatcgtaacttactcttcctgaacaaccactcaggtgctaaccatgtacaagaatcactcatagagaatctcttcaacgaaagaaacatctccgtagtgaactacaggtatgagcaaaccaatcaactaaactcagacggttcaatgaagtacttctttaaacagaaactcatgaacaagaaagatttagtttatagtcagagtaactaccagttagaagaactatctaaccgtgagatcactcaagctaagagtaacaaagctacctatgagtacgagcgtgaagatgtaaacaataaactactctacactctctctaacaaactacttactaaagacctagaaacaatcatcacagacgttactgatacagtcaagtataaactcattgctactatgatagactactgggcatacttagttaagattaagtccattaacttcctagtgagtgttacagacccaatcaacaacgttactgtacaactattaactgaagatctattcaaactctatacgttactcctcttcaaggctaacaacttagagttatctcacttccctaactatcaagtagatcgagtattcaaaccagtcttacctgagacagatgagttactcaaaacctactacaaaccacattactatcataaagatctgattaccgagatcaagtcagctatacctagatacactaacatcacaacggctttccagtttagtgagtttgtttctgaggtctatcaactcaatatcggtctatggttattagaaagtaatctccacgacaaagacgataacggacaaacacttaacactataggtaatctccacaccactgacactttagtcttatctgaagaaacaccagaagactttctacgtcgtataggtatggaagagttatatgtgtatcctgtagatgttattgaatctatgtcttatagtatcttagatagtttattcgataataagttagacttccttaataagtttaaacacatacagaaagctttagttactgtctttaagaagttcacaagttacactactcagatgttagatgactatagttatgagtcttctattttagcaggcactaaggatacccgtgttactatagatgagaatatacttagctatggttttgttcaactcgctactcccttaacagttgatatgaaatacaggttaaaggataaagagactctaaggtttaagagtgagatacatcattccaactcttactacagtgaagtttatcttcctgtcgtgcctactcaagagtttactttccgtaaacgaagtaatgtgtttgttcacatcacaccaagacctgtatacattcaaccatctgagagttggatagcaacaccatccactagagaacattcaaacttcttagctttcaatcctttagattaactcccaggagaaaaccatggaatcaacagtaagaacaatctacggtagtcacattgaaacatgtcgtcgattaaatcgtcctttcaacgtactacctaactctactcttaaccagaagtttagtgttcacgagaataccttacctggacctaatgagtaccccgtaatgggatacatcgctatcggtaacaaaggtgcttcttatgaagtaactgctgataattatgtattaactacaccactacctcacttaccacgggacgctagtttatataacttcttaccgtttgtaattcgtactactgacaatgatttagattcagcagaacgaatgaagtatcgtgtccgtgtacctatggtgatcaatggtactaactacgtagcttactacctgaagactttacctatcgctaacgtaattcctacagtcgaactacgtaacgttaacggtgacagtattacttcagcagtattcactcctagtgtatctgatctatctcctactcctccagatatctcaactactaacctgaacaatccttcaggtgactacttagtatctactgctaaggtagagtttgttctagatcaagtagatatcagtaacatcatggatgcttgtgctatcctttacggtgatcctcgttacgctgttattaacgagattgctttatgcactggagttgataaagtagtacaaggtacgttcggtggaaccacatctaactacactgatactatcgcaacacaggtagcagctttcatttcacaataccatgcgttatctccttctactacggaagtgcggattaccttggatattggtgcagtagaacctctcctagtgtaacatcaccaccactcggatcaacgtccgggtggtggctttattgggtatatctagcattttgtgaagcgcccatatacaccaaggagaatacagtgtttttatccattgatcccggcatcaacatgtgtggtatagcagttgtaaaaagccaaggtaataaattagaagtattagaaacacatctggttaagaacgctcgtaagttcaccgacgcagaaaaagaactagaagtcttacatggtactcgttacgttaaagtaatggctatcattaataagcttactgaactattagataaacataagactaagttattagttattgaagcacctttttattcagctttaacaccagttgccttcgggtcattgctagaagttatcctagctattaaatacactactgctattgaacgtaagttagaactctctatggtagaacctactttagttaagaagatcttcacaggacacggacgcgctaagaaagacatgatgaaagaatatgctatcagtctaaagttaaatggtgtacttgttactgatgtggatttctcactcatttctgaacacgaaatagacgcagttgctgttgcttatacctacgttaataaaccaaactaggaagttcctgtatgtacgcaatcattcttaagttcatcaaagataaactattctcaccgtctggtatagttctattaggttttggtgctatcatctttttgtttctagcttataacggagacactgttctatctaagtttggtttcgagactaagtcttctcttaaaggagatttgatccaagctaaagcagatcttaaaactcttaaagaagttaacgaagacttagtgtttaagatagatacattagaagcagataagaaagttactgtagaggtattagaagaactctataataagaaagctcaaaccaaagacactgtaacagaagtacttaaacaaagagaccaacaagaggtagagaatagaaagactctgaaggctgctacagtcgttacagagacaactatcactatgcctaaggttaactacgaacgtgcctctagaagcaatatagaagcactacacaacgcatttgctttacttaactagagtacccactatgaaacttaaatctttagtgttaataatccttttaactactttacaaggatgtggtatctttatgaaaccagaacctattgtagtaactagaaaggaaatagtccacacttacatcccagatacgttgttagttaaatgtcaagcaagcaaaccaattcctatagaagagtatctttccttagatccgatcggtagagaaacttacttaactaattattcagtccaattattaggggtaataaaagactgcgatgataggtttacttctatagttaaattacaacccaagaaataaaaagagatagtctcctgtctctataaggagtacacatcaatgcgtgttaacagccagcttaaacaaacactaatagagatagcagataaaacaatagaatattctaatgaagtagatactcaacgtaagtatttaagaaggatattaagaacctataaacatactctaaaagaagaagaacaaatgtatgtgcttcgagtaatatccgaaatgatacattatagaaccatagccactgatcctgaaaacatgattacgttaagtaacataaagctaagatcttatctaacgatctttttgttatcgtctgtctttatgttcatgactttctttctagttagtcaaactagttcagcttcctccattactgagttctttggtaagataatgataatgttaaccgactaggagaatgaaacatgacaaacaaagaagcaacatataccctagcggtcagagcaggatataaaactactctaactagtatgggtaataacgtttatgatgatgaagcttattacaacaaaggtaacttcccagatctagaagtaactcgacctggagtagatactgatcttagtttactgaactcacattgtttaatgactgtaaacggttatattcatcctaccgtatatcagaatgaaagactatacattcccaatggctctaagtctttacttatctctaaagaaaaccaagttggtataattagcttcaacagtctagataaaccactaaagaaattacctgtagatgcttctatgattactccagaaggatccactcctctttatgacaaattgattattacttttgaaagagatatagggaattgtttcctagttctagctggctacatgatctttgaacaacctgaaatattctatagagtttcagccaatagtttcgttcttagattagatagaatcaactacatcgagaaactatatgaactaaaaagacaacgtaagattttccaagagttaggtatggaagaacctacagtcaacccagatctgttagattcaactgtagtacgctctgacgttgttattctaatgttgatgaatctattcaatactttccttgtagaagttccttgtaaaaaactaactaccactcctatatatttagaacacagtaatgttcctggtaacttcagaacagaagtagaacctatctatcctattatagttggatacggtaaactcacagagtacattaaacgacgttctaacgacgttaagtataccgtctatacatcagactgtcattacgataattacctcctgagtaagcttccagagggtactatagggcttattaatagtaatagagtagttggtaagactcataggttaacacaagcattctttcttagaatgagtatggaagaataagtaactactccctctacccgttataggtagagggagtagctttctttaaatgagtctaaacaaactctgcttgtacacaagacggttcatgttatcttctagacccagtttcttatgtatgcaacgcggtgtgtttgagagaagtacatctatgattcgtttgtaattagagtgtagagtttcatcgtcggctattgcttgcacaacagacatctctttacctctaatagtgattttcttgtttagaaacttatcagaccaaaaccaatgaacagtgtaacttggaagtttcatcaactcattgtcaaacgaaaagtgtaatagagttcgtagtttagtgtcatcaacaacactcttatctaatatagtattcctaatgtgatatattaaacttaacatagatagagaaataaagatcttagatactctagctggtaagatatagaaaaacccaatagttaactgcttaagtaaacgtgagcctattgtaggggttggttggattggatacataaatgataccctttaggtgaatagatggacttcaatgtatatagatttactatctaccttaggttatattataagtacatatatagtaagtagaatagctaatgtcaactacccctaccttaaggtaagggcttgtgaagagtagccaactactccaacaactaagctgttgtactagccggattgtaacttagctacagcgacgtggtagtcgcaagaatacgtctcgaatgcttctctagttcggacctctatggtagaaagtggcgaagagaccttgacttgtcaacaagatcccgtaagggaataacttaaggaggtgttcacatgctgaactcccaagaaccagcaaaacaaagatgggttcctgtggtgtcttccacaggtaaacccttgatgccttgctctcccaagagagctaggaaactaatgtccaaaggtaaagctatacctagacaccttaaaggacttttctacattaagttaacggatagaagtgatggtgaggttcaatccgttgttgtgggtatagacccgggaagtagatacgagggatacacggttaagtcagctactcgcactttcttaaacgtcaactcactagctgctgatggtaaacgtgtaaagaggattatggaagctagaagtaactctaggagagctagacgacagcgtaagaatccgtaccgagctaatcgaatgaatcgctccagaagtaaagggtgggttccaccctctactaaagctaggtggcaacttaaacttaacattctgaagtggtttgctagattatatccagttaccaatgtggttgtggaggatgttatcttcgctaccgagaaaggtggtagtgtacgtaacttaggattctcagctatccaatctggtaagaattggttatattctcacatagtagctcttggttacaacctaaccactttcaaaggaagtcaaacagcagctttcagaagacgattgggattgttcaagaccacgaacaaagcttctaagttgtttgattcgcactgcgtagattcatgggtactcgctaacgaggttttaggtaaccaactaaaacctgacctaacgcacgtactagaactcaaaccgcttacttacattaggaggcaactacaccgtacttgcttcaagaaaggaggtattagaagtaggcgtggtggtactatgtctctaggtattcagagaggtactctggtaaaacacgttaaacatggtaaatgtatagtagggggtaacaatggcgtagacagagttagtttacattgcaacatctctgttagaaatttaactcggaatactaaactagtagacttgcaactcatagctcactcaccttggttactggtagatagactacgtacttgtaagaaagagaagaacgctagacgttacaacagatatttacttaggaactcgttactaggtaatatgtaagttaaccgagtagatagagtattatctatctactccctttcctcccctccctaaaggaaggggtcaccatggagtaaaccatatatgtttaaccagattctagaaaaagcattaccagaaatcaattcacatttacctttagatagttttacagagataacatcagtgcgacctgggaagaacaacgacactcattctatagttttagagggagtggatgtggatggttgtcgagtgattgaatcttactggattggttgtcgtgattcagattgtggtttagagaatgtccatgaactaaaagaattaccagacggtttgttggaggtaatgaacaagtgtggtaatgaacttacgttactacaaacagaagctattgtttaccatctgaataaactacaaggtttaactgaaaaaatcagtaacgactatgtaggtggtatctactcttataacgacgaaaacgttggagatagaacttggcgtaagttcttagtaacagaagtcactaatccggtatttccgatgagactacgtggggtctctatggacgacgacggtgagtgtcgtgaattagaaatctcccaactgaacttgttagagcgtgttggtgattatcctccactactctaacatcggagtgaaataaaactccatatatagtacgtagactgcaatcggtctaaccttcaaaccaaagcaacactagtaataaaaaactaaccgacaatatagtctggttagtaaacctatcttaaaccaggagtaacacaaatgtctattaaattcaaatcagaaaacctacaaaagcacaaagacttaagcgacgctatcaaagctaacttagctcttgatggaacttctatcaaagagaaagaaggtcacggtgcttactacggttctcttccagaagaactggataagaaaactgtagaagctgtagctaactacaactcacgctttatcacagcaagtcacattgcaatcggtgagatggctgctgagtgctttaacaagaacaaagacgcaacagaagttgaagcagagttaggttacttcggtaagtctgacaagatcaatgtttctgtagcacgcgaaaaggtatatcagaaccacatggcaactggtgatcaaccaaaagagatcactaagcatttggtaatgaagacttcagtagcttctaccagcgctaaaggttatggtcttaaatctatccgcgactctatgtcagaagagttccgtgataactttaacaagtaatcattagactagtacaacccgcccttagaaaagtctaggggcgtggactatcagaggaaacacccatgtcatatagacagtatcttccttcacttaacgtggagggcaaacacctttacgtttatagtcatcgtcaggaaatctggactgtcactatagacgaagaaagaaatacactttcagttattacagcggatcgagatttggtttttaaagacatacaagtcattgaaccatttaacgatattgatgttaaagaactatcaaacgcaatcttctttaaaccacgtatggattcttttaataaccaaatattcactggagttattttcagaggttctaatacgtttaagtttgctattaaaaatggtaagttatacttactagaagagatacaataccaaccaggaataaacggggttgagtataacgtagctttaggtttatctgtttctttctttcagaaattggaggatgaaggcactgaagtagtacacgctatatctaaagacgacaagatatacatggttgctagaggtatagtagatgacactgaagattatgattatttttatgctatagttgataaagaaacagggatgtatgataagatgcatttactatattcagatgtagaagatatagtattaactgctttaaatatcgacacagaatatcgcagtgtatatttggtgggatacattaaaccccttgaatctgaatcaccaataaaacctctattcgagagactaactttttaaggaactattatgctattaaatgtgtttgtaaatgacggaggagatcacattcgagtctccccttacggtaaaacaactgtaggacggattgcgtctatggattggagaaagaaattcttcgttccacacttaggtgaattctcgtcatcacgttgctttgccaattggttagtgtgtggtaatgaagatgctcgccacaacacacgtttcaaagtagataaaactgttaaaggttatcgtgctttgatgttgtatgcgaagtatcatcaactttgttctttaaagaagactttagcttctgagaagactaacctagtattcgtcgcgtataaagaacacaaaagcggtatcaaagaaggtactggttatcgtgaaaaccctgtagaagttaatgactttattaactatattctagagaacgaagatactactaaatacgattgggataaacactaccccggtttgttaggtatgattgattccttagttaaagaaattctaaaggacaacgcgcctcaagtagaaactaaacaggaagaagtagtagctcctgttgttgaagaaaccaaagaacctgaagtggagacagttgaatgaaccgcatttatgtaacagacattgagtcgattgatcaagatggtcgcattaaccgtgccgaagttgaagtgttagatggtgataaaccagagaacatggatatcatccgtaacttagttacagtagtacaaatgaaagatgagcagttgagtgttgagttcttccaagaagaaactggtatttctttacttaaagagatcacagttaatcctctagaagaaggtattgaccaagttgatctattgaagttaggtcaagctcctttacgtgctatcattaaagatatcactgatgtaaacaccatcatcatttcttcaatgtttgaagacctaaccctgaaagaagaaaaagaatacttcttacagtctattgttttctcacctaacgaagaaacatacaaagctgtagttgaagctttgaaagatgaaggtcaagaaagcggtgctattacgtttgatattggtcagatcgttgagtctttaaacgtgaaccaagttgtcgaaggtgttaagaaacacatgcgtgaaaataacaacccaacacatcgtagtgacttgcaactagaacacactctagtaactgcaatctataacgtagttggttctgttaagtttgctgatatggttcgtatccataaagaaaaacaaaccttgttagctgacttccctgacgttgagaagttggaagatggtagtgttgtaggtaattctgttgaatcagtagagtaacaactcgctactaaagagaaagtcttccttaggggaggctttcttttttccctttaaacgtcagaattctttgattacctaaccactaggagtataggcaatgtttacaataacgagtaagacggatactagtagacacatactacccgtagactcaacctttgactcagcttggttaaagagtacctttataattagagattctgatttagttgcaggggatgagtacgctaagtttgtaaagacaaacagatattacactacagcagatagtaagtttacatctacagctccaggtatgagtatggctgttaacccaatacctcagtttactagatatgctgatatacgtagtcctggtagattaagttctagacctggagactctttaggtagaggtgcttcgggtaacgatttagatgtacgcactacaggagctccaggtggttttggtttagggatgggacattactattcagaagctattgatgataaccaacaacgaatctatttacgttttggtgttccttcatacactaaccttttgttttggattacaagatcattcgatattgataaagccattctacagaatcgtggtgtaatcactacagtgttcttagaagcagtcggtgtagttgctactgtgtttgctattgcagcagctcctttgtttgctggagttgctttactagttggtggtttcattgataacagtaggttctatggttttaaggagactatgtatatttactggtctactgttgagactatcatgaacgctatgattgctcgtcgtactttagcaccagctgtgtttactgacttcagttttgctattgattcaaagatgcaacgtggacagagtatagataagactttcttaactaatattaatgaagtaatgccaggtttggttgatccagaaactggtagaattagtgtatttactattgcactaaaagcacaagctgcttataacaagatgttgttagctgatttagagttaagtaagactgaagaccctagtaaagattttacaggttatgcggataaaggaaatcctacccacgatggatatttccaccactctaacggtaaagctacttggtttacacaacgtatctttgcaaacgctgctaggttgttaggtgttactcctgaagaagaaaatagtatgtcttcacctacaacggaaacagatgtcacagggaacttagttgagatggatccattcaccttagacgtaaatggtaatccgttatctttagttattgatgaaaacgaccctactcaatctgtagactctataatacaagataatgcaaaagctaaagctccaacaatgactaggtataaagagtatactttagcttctttgtcagacggtggtatgtttgctgtgtttaatgttaatagcacaggttcagttggagagtcttttagtaactcaactacaggtaaccctattgagtctacctttaactcattatcttctaagtcaagaaacattactaacataatgaaatcagctaccgacttccctatagttggagaaatgattggtcttgctgctgacactgtaagtatgattgcgagtaaagctagttttggactagctaaccctatcttagctctcgcctacggggttaacgttagtatgcctaaggtttgggactcttcttctgcatcgctccctagagcgtcttacagcttcaagttgatatccccttacggtaatgcttactctcagttatttaacatctatcttccgttagctatgttgttagctggtagtcttccacgtagtacaggtaactcaagttacactgctcctttcttatgtcagttatttgatagaggtagggtaaacattcatctaggtgttattgattcattatcaattactcgcggtacttctaacttaccgttcagtagagcaggtcatcctaacgctattgacgtagatattagtgtagctaacttagatgaaattattgcagttgatgttactcagaatggagttattagtaaagcagtaaaagctttatctcctaacttcgccgatactcctatgactacttacctcaacactgttactggtgtagatgtgtttacacaaatctatcgtgtgcctatgatgagacttaagttagcagagagagctatggctattaaagctgtgactaatccagatccagcagcactagctgccttcactgtagagaatatgccgggattcaaactgttccaaggtataattggtaacaactcacaagcattaggtcaactcaaagatcaaggttcataaacaactaccaccaccaccgggagaccagtggtggtggttattgtttctaagatgtcatgtaagttaacacagactcgattacatcaacgttcatattaaactgcatgtcgttactatcagaaatatagtaactgcgtttattaaacaatccgttaatctcatccttaacatcatcagctaacataggtgtaactgagattgtgtctccatcaaagtcagctcctaatcttcctaagtgagaaggatgtacactagtagtgttaaagaagtctaatcctcgtatagggaagttagtagctatattaccagttggttgccagttactatctagttcttctaacacctctaccttaaaggtagtagtgaacttaatgaaagcaggatagataccaccataaccttgtactggataacgtgtaatcaaaccaggtatcttaccgtttaattggaacatagacatataaacaatctcagctaaactaacaggtgagactttagctttatcataaccttcaggtaagtcatctatgtcttgtaagaacttaaagtatctattatctcgatacaataaacctaggtaatgtttacctttattaaacgtaactggattgtggcgcatatctaagttacctagacctgcaattactttctcaagaccatcactggaagtccatagatcatgttctttctggatgtgtgtgtttagaacttcttctcgtttaagtgtcttaacgttggttaggtaagccatgttattgttttcaataaagacatcacgaatatacttattgcgtaactcgtaaatagacttaggaacaatacctctagcaaactgatgtatgccgattaaacattcgttatagcttaatctgttttcatctgttagacgtttagtgttgtcaactgaacccgataacacgttacgtgtagagttaaatacttttctagataaccacttacctaatactaacttattcttaccttccagtaatgatttaaggtaattgaataaatccactaagttattctgcatagtaacgtataagttatcatatacgtcaggtgtctttcttgcaacgctactatccacgatgttagatagagacaatagtcttctatagaaagtgtttacttcgtcctcctgtggcttaccagagggatctacgatgtagtctctaagaccagcaggcataaccataacgtatcgtagtaaatgtttcttagctttaatagaatctgttactatcttgatagcgttagttcttttatctgaactactagtttcaaatttcaattcttcaaggtgttttaagaagaaagaataacctgtattagctttagggtcgttactcttaacaaagtctttagttttagaatcaaagatagctaatgtagtaccgtccattatttgtttatacaaactcttcaactcacaaatactaatgtaaattaaaggatgtaatacaactgcgttcaaatcaatataaccaaacactcggttacggtattctgaaccaacagctccaaagatagtggttgagaataatccttcaggatggaagttattattgttatcaaatatctgggggtcatttatcttacccagtttaataaggtcacgttcttgtatatgtagtaactcaaggttaactggtaacttgttctgtgtagacattaagatgtcctctatatactgaatgaatactcacctgatgtcgagagttatttttatttgatttggtatggtttgacagcaaaacaactaggggagatacacccatggctggtaaaaaagataaagacgatatcgacaatttgaatgtggatttcgatgagttaggtgactttgatagcgatatagattttggtgatgatttagatttcgatcgcaaaccaagtactagtgaagtggctaaagatctagctaaagatgcaggtggtgggttcttagacggactagctaagagtactgctaagaaggttctacctgagtcttacgagtacggtgtaccagaggcaatggattacgttgactttggtaaagaagtagttggtaagaataagagtaagatagaaaagagtttatatggtctaggtaaagaagtaaaaaagatactccctttccagagtactcttctagagaacttcttagagaaacatagttcaaactttgagaaacaaagagagcaaagtgaagaagctatacgtgaagctagtataggtggtaatctaaacgctatcttcgacaaacaactagagatgcaaaaagctctagaaactcgtcgctccgctgaagacaaagtagaatcaaaagaacgtctagttactaataaacttcagactgatttactacgtaacattgctagttcttcaggacagcaaacagcattcacaactcaaataggtaaagagtattatcgtaaatctctagagttacagtttaagacatattatattcaagctgatatgttaaagactcaacgtgattactatcaaggatttactaaacagtttgacactattgtaaagaacacaggtttacctgatttcgttaaacttcataacactgagttaatctcagagactatgaaaagacgagctattgaaagtactacgaaacgaatctttgataactccaagtttgtacaaggagctaagaaaagagtttctagtctaatagatgataaggtaggtcagttaactgaaaaggttgaccaaatgacaggtggtcttgacatgatgagtggtggtggtaatccactcacactgatggctagtgttatgtcttcgattgctggtagttctttaggagagaaagtatcaggtaagatatcgcctaagataaaggaaaagattaaagacaacaaactaataaacacaggtggtaactacttagagtcccttgctaataacccacaagctttctttgagatgatgagacaaggaatagatcgtaagaaagaagcttatgaaggtgaggaaggacctcttcaatactttatgagtaaggtgttaggtggatctagttctatcttagatactgctataggtggtagacaaaagtttgaagttaagaacacgtctaatatcctagagaataaagcaccagctatctttgatcagagagcacatagaagtatagtagaagtcatacctatgtacttaagtaagatcctacatcagaacactaacttaaccggtatgtatggttcagtaaacggcgctctattacaagctaataaattctcagctaccggtgagttgatgtatgactacaataaccgtaagttagattcaagagaaaacgttaggaaaggtattgtagataaagcattcggttcacgcactaagaaaatacatcaaatatcagctggtatgattagtagtactgtaggtaatcttaataaagataagacaaagaacgcagatgttattaaagacattagtagtgacaagtctaagaacgttctaaacaactacacaaaggcaatgagtgaagttgacggaatgactatggattacgattccctagttacaactgcgttagatcctagtaaacaaacagaacaaatgaaaaattaccttttagataatcctgaagtggttcgtttattaaaagtaattaaagagaacactgaaactggttctcaacgtaagaatctagacataactattagtgatgctacaactctatatcctatcggtgacatcatgaagatgtttggtgagataagtcgaattgccggttctagagttcgtaacgtgatcactgaagaacaagctaaggtgttgagtaaatgcttcactacttacatggtaaaaaatggtatcggagttatatcctaccacgatgttatcagtggtaaagttttcattaaaactattaccgagaaagactttgagaagatcaaaggaccagttactattcttattagagaacttaccaatgtaattaatttagaagacgcagtgttaactagtaaagttatgttagcgtttacatatgttactaacgctatagctaacaacactgacaacaatccagagatctggcaaatactacatgactatagtccagacttagttagtgaaggtactttaacatcagctaacttagtcgaagctagtttagatatacagaaagataacgttgagtatgttagtgtagataagatacgtagtatgtctaaagctacaggtactaccctaaacgctgctaagacaagtggtgtgttagctagtgtttctaaagatatgtctggtgctgtaaccaaccttaaagaagttgctagtaaagttgcaactgctgcttctaaaggtgatatgaaaggtgctggggatattctcaaagaagcaggtaagcaactatcagcttctgctactgagaagtataacagacacgctagaactattaaaggttacgcggatgacttagctaacagtgttggtgacttagcgaacggtgctttagatagtttactagctaaacagattaaagctatcaatggagctatcaacggtatagatgaacacattaagactagcgtagaaaccagagatcagattaactctcaactagagcaagttaaaaagactatggctaacatatctaacagtgaatctagcattaatgaaacagataaaactattagagaatctgctaacaaatataactcagagattaaaaggttagaggctactagagatgttattcttaacttaagaaaacaattaaccagtatgcaagagtcaggtttagaaggtaacattgaacaaacaactactaagattagaaacctaatcaatggagttaaaggtcaactagaaagtatagtagatcaaagtagacttaacgtggcaggtaatgcctaggagttcacatggctgaatctatagaagaacttaacaaaagtgttagggagatgggagatatcagtaaaggtataaataagacagggatggctattagtatcatctctggtcttatctctggtatgtccaaagtcgtagacaagtttgatgttttcttgaagacaaagggaattgattttgctaaaggagctaaggacttaaagaaggaaggcgggaaagcttggcgaggacttaaaggtaaagctaaagacagtggacttactggtcagttagataaagctatagtgaaaacagctgatatcgctggacagataaaggacacttacgctagctacgacgagaacacagtgggtcccccaagacctggcgaagaacttaaaccaactttaggtgttataggtaagagtaagttaatagctgaagatgccttaactaaagggaaggataaacttaaagaacttaaagaagaatacttacctaaagatcttgaaactaaggttactgaagaaactcaagttaaaccaagacaaaggttaatgagtaagaaacaggaacgtaggttaaggaaacaaactacccaagtaaaacaagatcctattgtagttagtgaagagaaaccctctgaggttgaaactgactatgtagagtttgatgagaacttctttgaacaacaagcagagatgttacgtaaagggttctttgactttaataaagacagtgaaggtaagtctaaatcatctacacctgtagtagacacagtagctaatggtctttaccagttaggtaaaatcaccactatgggtactggtcaattgtctatggctattgcatctaacttagagaaagctacttggtttgtcactaaacattctgctaaactagcatggggtgttgctaagtggtccggtaagaaaattctaggtgggttaagtagtttaggtggtatgatgtacagaggacttgataaactgacattaggtttattgggtaagacagttaataaagttaaagagaaaggtaagcaagcgtttaactacatgaaagaagttggtggttctttcatggatggttataggaaaactagaaagaataaactatcaccagaaacccctgaagttaaagcaggttttaaagaagcttctaaggcttgggataaaggtgaaggttttattcagacagtaggtaataacgctaaattaccagaagaaaatattgaagaagtaaagaaacctaaattatctttaatgggtaaactaaaagacgctaagtctaagtttataacagcggttaaaagtggatctattcctaaagaagaaatcagtgatgtttctaaagaagaagtagaacctaaagtagttgttgaaaccgcagtaaagaaacataccattttcgataacttaaagaacgcgtataattctagagttagtttattacctaaaccttctatagttcctactcctatagtagaaccagaactaatagtagatccagtaaaaacagaagaactagttaaacccattaagactttaaagggtaaaggggaatctagattaggactacgaaagtataaagacgtatctcccttaaaacatcgcataggtaaacctagtttacttggtaatagaactagtatcgttgatgaatctaaacctactacctttgaagttgatccaagtaaagacacagaggctatcttagagcctaaagctatagagaaacccaagttctcctttaaaggaatgatgggtggtataaaggataccttcttagagggatatgattcagtagagtctattcagaaagctaaagagagagaagctaaagaaggacctaaagagtcactagctactcgtttaggaactaaaataggagacatgtctgtttccataactaacagtatagataaagctactttatttatgacagaacacgcagcgactctagcgtgggatgttgctaagtggtcaggacagaagctactaagtggtattaaaggtctaggtggaatgttatattctagtctggataaactgtctggtggtagactgagtaagtctattgactatttaaagaataaaggtaaagaattattagctaaaggaaaagagaaagctaagcttggtatgtctaaactaggatctatggttggtaacttagtaggtactggtaaagagaaagcagctgaactcctatctaaaggtaaagataaagctaaacaaggtatacgatacaccggtgaagtagctggtgaattggtaggcagttttaagaatacttatgctgaaggtaaagaaggtagagatgaagctataacaaaagctaaacaagatatctctaaccttactgattccggtaaagagaaaggtgtagagttactagctaaaggtaaagagaaactaggcacacttaaaactggactaggtggaatgttatctaatgctaaaacttcccttgtagataaatacaactctatagacacttcaacagaagactggactgtttctgaagaagaaagaaaactattaagagacgtagagatacaaaaagagaaagacttagttaagaaaagaggacttaaatcaccaaacaagttatccaagaaaggattactaggaatggttggtggtatcggtgctttatctttaagttccatgactaataaattcaactctaaagtacctactgatccagaagaagaagtaactgactctaaagaaaatgaagaaggtgctgagaaagtatctttgaaagatagggtttctggactttttgggtttaagaataaacctgaaacttgggatgaagaagctgaagttagagagcaaaaacgtaaagatgaaatcgaagaagaaaagagagctaacaaagaaagagctaaacctaagaagaaaagtgattggttaagtaagatcttaggtgctgttgctggtgttggtagtttcttacttggtggattcaaagcagttatgcttcctataggtaaagctcttctacgaggaactttaggtttagctaaaggtataggtaaacttgtatggcctgccgttaagtggttaagtaaaggtctaggtaaagctacttgggctgttgctaagtggagtgcaaccaaactactaagtggttctaagttcttattcaaaggtcttggtaaaggactaatgatgggacttaataaactaactggtggattagctagtaagatagttagtggggttggtaagtcggtacttagtatgggtagtaaactaggcggtcttttaagtaaaggaggtttactagggaaagctgggggactactctctaaaggaggtagtttacttcgcggtggtttaatggctgctaaagctattggttttaaaggtatggctatgaaagccggtgccttccttggtaaagctgctatcgttgcttccggtccagttggttgggctatcgctggcgcagttgcagtaggtattgcagcctacgctggttataaactatataagtatctcaaacgtaatgatctacgagaagacatatatggtaaactaactagactaagactactactttacggaatcaacgagactaataaagactacttctctaagatgtttgatttggagatggagcttaaagattatctagtcgaaagacctggttctacttcaggtggaactgtagctgactacgctcttaaaccactagacgctgagttcactactaaagcacttaagatattagggatcgacagagaagataaagtaatgtctgctaagttaaacgtttggtttgctaagcgttttgttccaggttacttgtctttcatgaaagctataaaggctgcagattctaaaatctatttagatgatattgaaggtctaaaacaggaaggtttagaaacattcctcatgaattataatatacctacaagtatatatcaaattaaagaaatacctattaaagataacgaaacgattttagtaactgagaatgacatacaagaacaattaacagatattaagaatgacatattaaacaaatctaaaacacctaaagatatcaataacaagataacagctaaaaataaacaagttaagactaataagcagaaagatttatccactaagaaaactgtagaaacaacagctccacctattaagccacctgacatatctaaagtaaaagatctagacggagaagctgaaatagagaatgaagctaacgcagttcaaactagtaaagataacctttctagctcagccaacgctaagttaaatatggcgggtggagatatggttagaggatccccagcgttagagggaatctcaactaaactagatccagccaagatactaagtatggatccacaagtagtagaactctttaccggtatggctaaagagtacaacatgataactggtaaaaacatctcagttaacgaggcttttagatcctacgaggatcaagctgcacttcatcgtaagtatccaaacaaagctgctcctcctgggagatcgttacatgagtttggattagcagtagatatcaacactgtagatgttaaagcactagacgaacttgggttattacgcaagtacggttttgctacttctgtcggtggagagacctggcacttagaacctattggagtttctttaaaccctaacttagctaaaactgatatggctttccgtgagcaagctattaaagactcacctggtagaggtggattaggttttggatttgctaacggtaagaaatggagtagaaatattccgttccagaaagctatatttgctagtaatccaactacaccaattaagaatccagtacctaatacaactgaagctattaataacgcagtgttagctactaataaaggtaacacaccacctgctagtacagttaaaccaatacaagtacctaatagaatacctacggttaatgaccgaccaccagcttcggttcaaggtaacaatccgttatctagtaaagacttactaatgccacaggctagaaacattaacactggttcaccaactaacactatagactcatttgcagcagatactagataccgtatggatgcggcagctatgactgatatcaatgagagtagtagtatggatcctgttgctgctattcatcaagctgctagtatgtcagagatggatcctgagttgttaatgactgtagctaagattgaatctggtttagatcctaatgctaaggctaagactagttccgctactggcttgttccagttcatagcctctacttggaatgaaataacttctaagaaaggtgagaagtatggattaaagacaggagctaatattagaaaccctctacataacgctttgatgggtgcagaatatcttaaaggtattactggtggattaaagcagtataacggtaatgggttaagagaagatattaaagcatatctaggacacttcttaggtccaggtggggcaagatctatattgaaagcttacatggctaaccctaatgctagcatggctaatgctgtttcagctaaagtctttaatgctaacagaagtatgtttacaggtaaaaccattgctcagttcatagcctccattggtgagaaattagatagagctaagtcaacacctgcaacacaatacaaaggtggtcaaggaagtacgtttgtagctaaccaggaagactttactcctaaagataatcctggaatagcagagtctggtgtaggttctgagagtcctcagggacagtctcaatctacaagtgcaccaatgcctcctattaaccaaacaagtgccgctatgagtccctacggagctcctactggtatcagtgatgttaatatgcagcagtcctctccatctgaagcaatgtctccagttcttaacacagagaacatggaaaacttacttggtcaacaggttacactcctatcgactatggcaagtgtgttgtcttctattgatggtaagatgcctaatccagacggtacttactcaacaggtaaaccaactactagaaagattcaggatatccctaaagggaaacaaccagactctgttgagggtagattaaatgaccccaaacaaaattatgaatcaagacctatgactgatcaagagaaacaagatgctagtgatagggacaaacgtatgtacgaaaaaagaaaagaaatgctacttaagtcagcgtctcctgtatcagggaactctgttagtgtagcaagaactagtatgaatgtagacgtgtcaaactactaaacgagaacaacccctcctctaggtgactagaggagggagttgtcaatctttaactagcatgtatagaacgatgtatatataaactgcgttacgtagattacggattaatctatctccaggttcaatcttattatgtttatagatcatctttaatagtttatcaccatcgtcttttactttgttgatatctaaatcagttccacgagcatataaaacattacctacgatatgattaatcacatctaataaactagtcttactgtttaagaatacgttgttgttctgtaagtaagtaacagtgttaactactacatcgcgaacgaatccgtagacagcatcattagctttcttattctcctgtgcgtagtcaactatataactaagtgaatcatacatctgattgttagacacactgttaatgatatcagtaactacagctatgtattctttcttgataaaagaagacttatctgtaagagctgcatctaacttattaatgtaactagtgataccacctatcttatctagaacaacatcctcaccagaagcatcactaatgatagctcttttactttgaatgatctcatctgtttccatcatagcaacaaattcagagtagatagatttaagagtatccttagatctaccaaagaggtcggtgatagcgttaggtaaagcacgatcatcattcatcttaactaagagtggtaagtacttgttcttcaaatattcttcactacgataagaagcatattcgttccagttctttaactgtttaataatgtaccggttactcaatctctcagttagactcaaagccttatcttcagagataggatagatccagtacatactagctataagaactaaggtacgatatgtaaagtagttaagaatgtctgtagcgtattctagttgcttcttcttatctagatctttgttagataggaatctatgagctacgtagaaacaaactaagttaatgtcatcacgtgctatcttaaagttcttaggtatagaagtgatgttctcaatacctttaactactacgtcggtaggtagatcaaataagttctcgtagaagatgtctttatggtagtaggtgtaactaaagtagtgacaacctattaaacgtgaaccaaagaagttcttatggtcatctgtagaagtaatgaaagatacgttgttttgtatgatcttcttatgtagactagtatcgaatttaacattagcgaatacttcgtctaaagcttgtttaaccttcaacggaagactcctggaataaagaactaatgtgtttaacgaaagactctacactgtaaaagactgtaggtgtcttattagttacgttagttaagaaccattcttctttctcagtgtggaaaccttcattactaataagaagaatatcgttaggtgagactgaacgtaaagttgcaattgggtcgttgttgattgactcagtagtaaccacacgtgcttgtgggttgttaccttgttcttctttattcttatctgctagttgttggatagttgcacgattccctaatacctctaagagggtcttagctacgatctcagctacacttgcatctacattgatagtaacttgttgttcttcaacaggaggagatgtagtgccctctggagagccttctgttgattgaggagcttcctcggttttctcttcatacttctttaagatgaaagtagtcatggttagttacccctattgttaaaagaattagtcaattgattaggtggattatactttatagattaggaaggttaagaaatggaacagattgctattgcgtttactggagttattgctatatggttgagtcaagacacaagagataactatagaaaatatgcgtctatcttcgggttagcgggacaaccgttctggatctattcctcttatcaatctgagttgtggggtatcttagttctgtctgtgttctatagttatgcttggtttaagggatttaagaataactggttaaaaccaaaggaaaacatttgaatggtataaggttacatatataatacttagtgaactgtgtagaatatatctaccaggtttaaagtgtagaggataacgaatgaaagtagtattaggtttgagtgacgaacattacgagttaatggaatatgtcttaccggaaaaacgccaccagttgaacgtagagaaatacggtaatatagtaactctagtaattgtagatggtaaaaaagctattcaatacgaaggtcctagagatcatctagttatactaactgatctgttcttccttagagatattaagtttgttaactttgaagtgttagagtacgtaacagaaacaccaaaacaactttggtgggagaaagaagttgggtacttagttaggatgggaaaggattatgtcttagatctaattctaacaccggatcctaaatggagtcctagagagattggtattcagttaagcttatacccatacaacctgcagttagctataattttactgtggaataataagtggggtgacgctattcgaagcggtcgcaaggtgagagtttactgaatagagttgtaaccaagggagactcttaactgagtctttcttttttccacgtatatgtcttagttagtacctgaaattcttacagttacatatatagttattagaagctatactgaatatatcagttagcgaacttttgacccggaggtcatcatgaataacttctctaagttctgtgcaggtgttattgctggtgttgtaattgttgtaatgtctcaacttaatgctcaagataactctcgccttgaaaaggtgcagagtggtgagttaactcttacctgtcacctcccacaaggaatagtcgatatcgagaaggaattagtaacaggttacgatggagaaatgtggaagttcgaaaatggttcggcgaagtcatgctggacgaattaaaatcactcaaggtaactataggagaaaagaaactctctctggttaccttgagcgatctagttcaagtgaatgttaagatcactcaactagaagctaaccgtcttctaggacgtctattagacttagaagttattggtgagaggtatgtagctattgttagaactacagatccactcatctggcaattcaaacaaggtcattactgtccttgttgtgaagggggtacagtacactaatataaagaaacactacctatgttagctggtagtgtttctttttttctttttctcacatagagtaactgaactacacttagtaacatatatacaatctataataacggagattaaaactatgatcactgaagagatgttaaagaacaatggactacttataaagtatattcgtaatccttccttaagacaaagacgtttagctatagaacaaaacccacacgccattaagtatatcaaacaacaatctaaaggactgtgtcagttagctgtggaaggagatccatacactatcagatacttgaaacaccagtatgaatacctagtggaatacgcagtccttaaagatcctaccgtagttcgttgggtgagaagacacactaaacatctaactgacttaactctatcactagacaacacactagagatatacatacacgatcaaactaggagtagattcattcgtaaccgtatagaacaagaaggacgcatagtgcctatagtctcttcctctagattttctacacttgaagaaatacagaagtctaaacaactagcaaacaaaatctattacaaccaacccagtaacacctgaacccagtataaacacatatatagtaagtataagctatactgaatatatcagttagcaaacaggagtaacattatgattaagtctttaagatccttaccagaatacaaacaattgagtcgttcagttaaaagacttgcacacctcactgttcttaatgaggttaatgacactgattatgatttaagtattgtgcgtcaagaaatccatgaacaacaaaggcttttatctagatctattagtgaaggaagtaaacaatacaaagagtggacagatcactctaagttatacgtttacactgttatcacttaccatgactacgaggaggataactctttccactatcactgtgtaaatggagattactctgaagaatacagagaacataatcatagggtaattattacggataaaaagttacctgagttagattacgactctaaaagtcttaacgctctttgtggggagtggatgagtcttaacttatacaactacattaagttaacgttggagaatttcagtgaaaactaaaaaagaaattaaagttagactcacacaactacaagttgaactagaagaattaaagggagtttatgatttaaaagtagtaactcccaagttgagagaaataattaaagaagcacagatttgtaaagagcaagctgatatacactactacttagaaaacaaaaacagtattcaattacattaatagagagggacaatgtatgtctaaccaatttgaaggtatgtccgattcagaaattatagagttgtatagtaacaacccatacactcctctctcatgtaacttcgattactttggtgaaagcttagtcatcgagttaatgaaaattaacggattgtggttagagtatgtgttagagcaaacagaagctatttgtgaagctgcaataagacaacatcccggggtacttagttatgttcgaaagcaaacagagtatctgtgtaagttagcagttactctagagggatttaacttagaatatattcgtagacaaactcctgagatggtggcgatagctctaagtgtgagaccctacgctttacgttacgtacactatcaaactaaacagatgtgttacgatttcattaacatacatccagaagcactttgggttattaaagatcaaacatatgatctgtgttacaacgctatccttagaaacccacacgctttagaacatgttaacacacaagtggaggtgttatgtattgtcgctgttaacatagacggattagcattacaacatgttaggtatcaaacacaagagatcatagacactgctctgagacaaaacccagaagcagctaaatttattaatacgtattaaccttaataggaagacaatacatgtctgatttaaaagatctaagcttggtagagcaaaacggtttgttagtacaatacttaactaatccatccttgcgtgttctacgcgcttctgtaaaacagaacccggaagctattcgttacatcaaacgtcagactcacggactgtgtttgatggcggttaaacaagacggagatgtacttcgttacattcgtgttcaaacagaagacgtttgtaaacaagctatcctcaataaaccaagtgcgttgttacatgtaaaacacaagacagagtacttgtgtagtttagcggttaagttaagttctttagacttaggtattgtaaaagaagaaatcgaagaaggtgatcttctaccaaagtcttttcattccacaccagtgaagttagctatacgaactgtgagtaaagacggacttctactcaaacacattaaaccccagactaaagaaatatgtctagcagctgtgcgtaacaacggactagctcttcagtatgtagagaaccaaacagaagagattgtcttagctgctgtcttagagaacacgttagctatggagttcattaaagatccaaaacaccgtgacatgatagtagttcattatgttactaaagacggtaaacctaataacacatctcactaattaaaggtaaaataaaatgtctaaagaacacaaaaagttaattgatgagtggtatgcgtcaatggaaaaagatatagctgaactacttaaaaccaaaacccctgtagaagtagttagaatggctcctattaacttaatgtttattaaagaccaaactgaagagttatgtgaagaagctatcaaagctaacccttggtcctttgtatatgttaagaataaaactcctgagttatctaaactcgcagtgagtcttaacggatatactattcgtgatgtagaggatcaaacagaagagctatgtaacttagctatcgagaatcaacctggagctatccaaggtatccgtgatcaaactgaagagttgtgcttgaaagcagtaacagcttcaggtagagctttacagtcagtagttaatccttctgaagcggtttgcttagctgcggttaaacaacacggatatgcgttacagtggatacccaatgcttctaaagaagtatgtcttgctgctgttacacaaaacccagatgctttagagtgtgttaatgatgactactacgaagaatgtgaacacgcggcacatttagctacattagctctctctgaagaaagtgctaaagaaaaagctttagaagacactactcgcggaactaaagaagatcttgattctgatcttttcaatgaactttcaaccgagggatactttcctctaactgagactcctctggctataaaaaatccgactattaagacgttattgatcgagttggataaaacagtggacccttgggatgtggttaacccagatgcaggagtcaatgtactttttgataaatggatgaaagacttaaatgtgtttgttgacgatgtcactcgtaagagagaattggctactaagataatggaagaatacgaattacatcaagaaggtaaagataacgcagaaacattaagtttattaataaacgaagcaattgagttgggtatgttatatccatcttctgtagaataacatataaccccaaatatagtaggtagattagaacacatagtctacatagtctacctgctatctactgagctgcagctcaaactttccctaggagaaacaaaaacatgattaacgtatatgcgtgtggtggtgctggtggtaacattggtaaacagattaagaacttagacatggatgtgttcttcattgatacatctaactctaaccttaaagacatcaagacagataacgtctacttggtagaaggtatggacggtgctggtaaacgtcgtgctaccacatacgaaggatttaaaggtttagctgaagaagtattgattcgtttcaaaccttctacggatcttaacatcgttgttagttccctcagcggtggtagtggaagtatcttgagtccactattggttaaagagttgattgctaatggtagtaacactattgttatcggtgtagactctcgtagtagtgttattgagattgataacactatcagcactctgaagactttcaaatccatcagtgacgctgttgataaatgtatttctctcttctacgtagagaactcttctcgtaaagaagctgacaaacaagctatcaaccttcttgagttactagcgctattagtaaacaaagaactaactgaagagtttgatacctcagacgttcataacttcatcaattacgataaggttactgacaacgaaccaggtgttgctatcttagaagttaacgctaatgaaacaatcctacccgagaagggcactacgatcgtttctacggtgttattgactaaggacactggtgctaatatcaacccggctattccagagtacctagcgacttgtatcgtgactgatcctaactatagtctagcagatatccgtatggataacgtgttaggtaagttagtacacttagtcaaagatcttgaagagcaatctaaagaacttaaagacaataagcgtatcaataaacatcagagtcttgatgtagacaacgctaacagtgatggtattgtgctctaagtaaacaaccacaatagaataagaggacttcggttctcttattcttttttaccgagagattaaatatgtataatagagtagaagataaattacgtaaagataagaaactgtttgtttatagttatttagaagaatacgacgaagaaaacgaagaatatactttaactacatgtcctgtagatgctgttgatttaaaggatactactatcttcttttcggatgtagagttagatattgacgaaactaattccagacaactaaagataactaatatactagatggtagtttagtagactttgaaaatatgttagacatggctaaacgatggcgtctactaccagagtggtgttatgacgctatcaaaggtaagtttcaattaccagatgaaggtatactagagtttaacaaagtagaagactaaacaacaatcagagaccacacagcatcctagctgtgtggtctctatttgttacatctctcttatacgttgtattttttcttctatgtctttaccgatatcaaaggaaaacatcttacgtatttcattactattaatcatacgttcaactaaacgtttccagtcattgatgtagtgttgattcattcccttatcataagcaacatcatacaggaagatcatgtaatctaacttagcaacaaacaccgaccatctaacttgtctagtgggattaatgtcactcatagataacaactcactcatatcttcattaaacactaacttaatgttacgcatgatattaatgaagtccatcttcctaccagtgattactttcaaggtatcatctaagtacctatccaactgcatagtaggttcgaacaacttgaacttatgtttatacttaggagtaacaacatctctaccgtagaacctatccattaacttattgagtagagtatgatcaaccacgtctttcatcatgaaaggtaagatatgtctactgatgaattgagtcttgattaaagcagcgtcttcaccttcctctaggaaacgtatttgttccttaataaactcacgatacttcaaagctaacataggtatattaatagagactatatctaacccacttctattaccatcatctctacccaaaggtaacaacattctatcgtcattacgattgtgtttaagtacagagataacagatgaagtcttccaacctttaaccgcttcattcatatcgaagtgatcgtagttagacatgatgatactctcaccgtcattaccaaagaagtaactagggtgaacaatacctttctccatctcactagtaaacttaaagtgcttagctatatacatagtacgttcagatgcaaagtctaagtatctatgaggatcatagctcaagtgtgttgggaagtgttccatgatacgtgagaggatatgagtattctttacagcgaactttctagataggtaatactcttctatcttcctaacgttgaattcatatagcttccttaagtagggaatatccctttgaatgataataccggtcttgggagtacgacttatgtagtcagactcgaatacttctagatactgcataatggtaagtccctacatagctacctgactgttcacaaaatacaacaagtactaataataaattactatatgaatacatacatatggaggattaactaagtacatgcatcgggaacctttataaacctatatatagtacttagataagcatacagtattaactgtgttagctatatctaccctcactctaaccggttatagtgagtagtgttatgttgagtaaaaaataactcacacatacatacagtggaaagatatcatcgacgtaaagtcggtgtgttggaccaaggaagaattaatcttaaaaactaacgttagtagtaaactatataaaccaggagttacaaaaatggccgttaatgtaaagaacaaccaaaaccaaaacaaccctaaccagggtcaagctcaacaacagtaccaacagcgtaacgctggcttcactcctaactttggtatcaactctcgtttgagtgtattcggtaatggtggtgaagtatttgaagctctctatgagaagctaaacgcacaagttaagtactttaatgaagaagcaaaaactgctgaaaagtatgcggttatcaaactcttgaagcagaatgctggtttgaactacagcggtatcgttctttgtgagactctgaatgatactacttcagctcacatcttgatggtagagcgcactggtgactatccagagaaagtgattgagaacatcaacggtacacgttacgagatccttcgtacacctgctgatgctttagatcataaatacgcagcacaagctcagttagctgtagctgctgcactgaagattcctgctgactcagtagtagttactgacggtgttctagttcctaacgagtttgatgttagtaacgaagtagcaactatggatctactgaacaacgcattcaaggccatccactcagaaaaccagatccgagtgaatgactataaaggtatctctattcctgagatgatgcgtgataacccgaacggtaagttcttagttaacatgtactttaactctgaagaagttgatgtacttgatcagatcggtttaccaatccgtcaagacgtttgtatctcactgaagtacaaagctaacactggtaacgacaatcgttcagttaaccaatctaacgacatgtttgatgttgttaagacttacggttatgtagactttgaataccaaggtaaccaacaacaacaaggtggatacccttcaactcagaagttcgtaccaaactttgtaatcactcacatcgagtctgaagttgcagctactgctgacatcttgatgttaggtgttgcgtctgtcatggcgttgaacgaagacttacagtggatgcaagcgttccgtagcacagctccacgtaaaggtgagagtgactacaacgacatcggtggtcttaacgttgaaggtaacttagagaatactcctactggttacggtaagaagtatgacactaagagcaagactttctcaatgatcgaaatgaacaagttcatgcagacattggttcgtcctaacctagttgtgtctatcgacgtacctaaagctggtggtgaaacttggtacactagtatcttcaactacgttaagaacggtgacgttggtgcatttgagcgtctgctcttaggtattaacacactgactaacggtggtatgactaactacgcagctcaacctttcatgggtattagtaaccgcattcatggtggtttctataagaccaaagacggtatgaaagatctgcgtcacttaggtagctacttgagcgtaagtaactatatcgctgatactgcacaagacccagcactcatcagtcagtacactaacactctgtacaacagctcacttccaactgagttacgtgcagcagaacgtaagaagtacatcgacgaaatgagtaacaacaccgcagtgtacaaacagtactacgaccgtttgaccttcactggtcacttcttgtcagcactgtctactgcacttggtaatgctggcttctcaccagtgttcagtaacatgggtattgctaacgatatgttcgcacgtcgtagcactgttgacttcagttcagctatgcttgatccgaacgctcgtttcatgggtcagaacaccacttacggtggtttctactcaccacgtaactacacccgtggttactaagtaacaagaactacctgtaacactagttacctctggggatcattcctcagaggtagcttttttttgttaactttagccacagaggtaaagtactatgatagacacccgagctattatattagcacctagtttagatatttataattccattaaagaaatggtttctcaggtgtattctgaggttatgtcgtttgaacaccctatcaacacgttcggagttacacgtcaagaattattacaacatgtaactgaaaattacggtgtagcgaattcttcgtttacaagtgcagcaataataatagcgtacagtgaaacaatctattctttaatgataagtagagtggttgcaacaggtgttatgtacaactcaccactaacacccaggtaaagtcatgtcaactacccctccccccccccggggaaggaagggtctccatggagtacagttttatgaaaccaacacaactagatctaatagaaccaaacccttttgagggtatggacgataaacaaattatcgaacacatgttaaaagaagactatttaccgttactaagatacgtagttaatcccactgaacgagttattgttgaagctttaactattaatggaatgaacttacgttgggtaaaggaacaaactccttacctatgtagtctagctgttaaacagaacggatactctattcaatgggttaaagatcaaacagaagaactcaagtggttagctttaagggagaacgctgagtgctatcgtttcattaaagaacccaccgaagaaatgagtatctttatggtttctgactccgacattaaaccttctttagatatggttaagaatcaaactaaagagatctgtttagctgccgttgaaacttttggatacaatctacgttatgttgaagaacaaactgaagagatgtgtttgttagcagttaaacaagacggatttaacatacggtatgtgagagatcaaacagaagaaatctgtatggaagctatcgctaatgaaccagactcactaatgtacgttaaagaacaaaccgaaaagatgtgttatttagcagtgtctaaagcaccaaatctagttaagtatgttaagaaacaaacattacctatctgtatggttgctgtaactaaaagtcactttacattgaagtacattagaaaccaaaatgtagctatctgtatgactgctgttattcaagacgggagagccttacagtacgtaagagagcaaactgaggagatctgtatagaagctattactaatcacccagactcctttaaacacgttcacagacagactcctaaggtatgtttgctagctgttaaactaaacccttatctgttatgtgaagtacaagaccaaacagaagaaatctgtatggaagctatccagaataaccctttagttatctcacacatgtggtttcaaactgagaagttatgtatggacgctgtaaggttagactctagtgcaattgaacgtgtaagaaaccaaacagaagaaatgtgtcggttagcatatgagaataacccaaagactattatttggatccgagactcaaatgtagtctctaaacttattaacgaaacatcccagtctaattaggatagttatgcaggaacaaactaacgaaacaactaaaatagatttcgataatcttagtagcggtgtattacttacagtgatacgttccaacggtcttaatcttgaacaccttacagataaaactttatctttatgtatggaagcagttatctctaaccctcttagcattgtgtttgttcctgaagacatgttagatatctgtagagtaatgtgtacaataggtgaattgaagaaacagatacagacagtgttggttgaaactcgtaaacagttcaatgttagtaaatggaccattgaagagttagatattgagttatctaaagctattaaaccaataaagatacgtcgtgatggagagttctatattagtatttactccatgagcgattacgtctccactggtaatgttaagatttacatcgaacacactgtaactgagatctctaagatctttgagctaaagatcaaataaactataaccactcccagggctaccctaggagtggtttattctttacgtagtgggatgtaatacaaacacatatatagtaagtagtgtgggtaatgtttattttacttacatgttaatagcttgactaactggagtgaaagataatggctgtcaagtttgaactaactagctttgataaactgttccacaatctcaacaatgagaaagtggtaattaacaacattgatatcttcatagaggagaacaaagaagttctagatagttacatcatgcgtaactatgatacagataacatcagcactattcctagctgtcagtgcggggaactgaaaggtaactactatcttaacacagtctgttcacgttgtaatagtaaagtaacagcttcagtggaagataacatctctttcttgttgtggagtaaacaagtagaaggtgtagagaagtttatatctccttatcttctttcggtgttattagatcgctataagatcactcgaccaccaactgctattgttgagtatcttatcctaccacctaacaagttaactaaacgtcaacccaaacaaaatctacatcgactagaacgattagatatgttactggaatcagctggtatccctaaagggtataatagctttatagctaacttctacacgatcatacctattcttgagtctgagtttgtaaaaggacctaaagaagaatctgaagagtttatgcaatggttaatagataaccaagctaacatctttagcgaacacctaccttatcctaacaacattatgtttgttatggacagtaatccgttaggacgattcattgatcgagaagtaatcaaccctattaacacgattcgtcgtatgacaggtattgatttacagacaagaagtaataacattaaacaacaacgtgtagctaagagtttagtagagctaagtaagttctatcacaactatatgaaatctaagatctttcctaaaccaggtttgatccgacaacatatcagttctacacgcagtcactttactgctcgtggtgttattactagtattcctggtcctcatcagtatgatgagatccatttaccgtggagtatgtcagtaacattgtttcgaccgcatgtaataaacggtctttacaaacgcgggtatggttacaatcaagccattgcttttatgatggaacacaatcgaacctatcatccgttaatggatgagatctttaatgatatcattaaagctagtggtggtggtgtgcgtgttatgtttaaccgtaacccaggtttacaccgtggttctattcagactgttcgtgtgactaaggtaaagattgatagagacgacaacactatcagtatgagttaccttattgctaaaagctttaacgcagactttgacggagacgcacttaacttagctttagtgttatctgagaaagtacaacgtaaccttgataactttgaacctcaccataacctgttgagtctatcaggtattaatgagtttaatgataacatcggttatccaaagactattacatctactttagcgagttggtataatagttaactactaacacaggagtaacgttcatgactgatgtaagtgaagatcagaaacaactctacgaagaaactctaagtaagatgcgtgtcaagttaaagaaagaagggcgagttcttttaaacactttagagatagaggagttaaaaagtatatcacctaccttactcactgagcaattcgaaagagagttgagtgtaggtatggagaaaatgcaacgtaactcaacttacggagctttccctgagtatgttcctgacttagatgttactatgatgtatcctagaacagttgaaccacttaagttaaatttacaaggtatgtacggatcacacgctaaaaagaataatgacttagactaaacactaactacctatatggtcaggaggaataacttatgggtcaagtactgaatatatcagcgccagccctcgatcacgttctctacggagataaaagtcaagtggtagctaactatctagctaaccaattacaaagtttaccaccagcgtttaacgaactctcacagcgtgtttatggagctatgcaaacttcatataactatgttactgataagcttacgcaatatggtatcttaaatcaactacaagacgcaggagtacaaggagtagataactactacactggactatactccttccagcagcttcaagaagctaacctaactatgcaacgttgggtaatgtctcatccaggtgtacgtgaactatatctagaacagaacatagatggatatagcgaatcttacaacaacgtctttggtaacgaagtaggtgttgaggattataactatcgtcgtgtgatggacggagttcctgttgatcacggtacacagtttacagtaacacattacgttgaagatctattaagtggtgaccgtgagttagatcatcatgaaaagagtcttattcttcatacgtatgatactatagactggttgctaaaagaaggtgactttgactttactgtagattcagaagcaccacctaagataaacaaataagagatagtgagatgtcagataaaaagtactgcggtggaaagttaaataaggaagaagtagaagaactcaatcgactactactaaagaacaaactggacttacctctacaccgtagagtagttgacttatcaggacgtaattacgattggttgaaaaagaacctaacgttaaagaatccagatgtctctggtagacttaaagaactcttgggtctatagtaacaagagagatcacacttcggtgtggtctctttcttttttggagaaaaacatggctaaagtagtaccttctttatctgaccaaggttgggtaactagtacacctagaattctagagaaagtcattagctattatattaccactgatggcgcacagtcattagtgtttaaagatagactaattaacctacccactacctattttaaaaatattaatgatccagatggtatggaaagagctttaagtttagatttagaagaattgttagggcgttactttgaagactctgatgtgttgactgaagcaatagaagtaaaaccttccgaatacggtattctgttatccgtttcagttataggagcggatggtgtaaaggctgatttacatcgagtattagaaatgagtgaaacaggtttgcgtaaagtaataaacattagcaattacggtaccgctaaacaagctttgaatagtttagtggattaactaaattcaacggagacagatcatgtcactagaaaaacatataaagatgcaacaagacgctatacacagtgacattacctcaaccagagatcatgtcttcgaaggtttagttactaacctaactgtgtctagaattccagaagaactatttgttaatcgttacttaccagctttcatgggtaatcctctagacaacaattgggttgtagaatggattagcattgcaggtagtccagcttcagaagttgatgtgtttaatagtagtactggagaaactttatatcgagtacctccattgatggctactagtaatgttctcttaggtcaagacggtgttagctttacagctatcatgggtcggtttgaacaactatcaactaacatcccacaacacggtatgcgtttcttaaatgaagctttagctgataaaggggatcaagtagatcctaactcgtctacagttatgcaacaatggcaatatattctaggtagatacaacttgttacctagtcaaagtgttgctgttaatagcgataacgatgatgacatggatgatttcttagactattaattagcacctacatccatgtgcgggtgtaggtgttttccattttttgatttgagtattctttttaaggagagtcgttatgtcaggtaacgctataggtgtgattggggcagacggtagtactcccatttatcaaccagacgcccgttggactatgtggagtatacatgatatctacagaggtaacttagggaagaataagtttattcctaaggttaatgattgggtaattgaaccagaaacaggagatatgttcttagtcgctgagttggactttatgacatatattccagagttagtaccagtaactatacaaaaacaaaagagtgtagacgagattacctcacctactaatgacaactatagagtctactacgataagtcagttagtccttatactttatctgtagatggattaatgcgagttaacggttctaattcgtcatttgcaagagtgtatcgtggtactacaatagatcctactaaaattatatctagacgttacgataatagcggtaactttattggacatgatattcctttagaaatcgttgcttttaatagtcatgataattatgctattaaatccataccttcttgtaattgcgatatagaattaccagacggtgaagtttgtattgttgtagcatataacactagcggtaaagttatcagtaaagtaacttgtattatagaagaaactactcacgtagcacaagcttatgcagaacaaaagtatatcactcagatcttcttgaagagtgctttcattgatactactaacagtacagatatattgtatccggttaacttacccactgcttcctttaaccccctcggtgtagttcaatacaacgacggtacacaagtagagtatccaattgacggtaataagtttaacttgtacgggttagatcagtttgtaagtactattataggacataaggttcctatggttcttagttatcgtctagatgacactgagtctgctctagcctctgtggatagtgacggtgtttacattacacgtccttatgatcttaaagtaagtcaccctaaccgtagttataacgttaagttgtttgtgtatcctgtatggcaagatccagttaacggatatacctacagagcttacatgatgagtttagatcgtaacttcgttatggacgtaactgctttcgttggtatctctagtaattcacctagctttaatccacttgcatatggtgttactcaacgagttactttcactatagacttagctaatgcttcaagtatttacaatcacttcctacatgtacagactatagacattactttacgtggtcctgcgtcagataacagtataactaatatttgggaagttggttcacaagtaccttctaatacaccttactacggaactaatctaatcgcaaggttaaatcagctaggtacagggtttactatttcaagtggtatagaaactaaggaagaattcttaactaaagtctataaaacaacattacctctacgcaatcctttaactgagttagaggaaccaattccaacacacatcgaggtaagatatttagatgaagtcaagcgggtaactatttctgaattcaagaatgtattcagttttaccaatccaattcaacctcattccaatatagagatagtgttcttaaaagaatccatctcaggctacctcaaactttcattagcggttatgactgtgaggtaattatgtttaaaaagatccgcactaccatatccagatggttaacacacatacttatttataacgtcatcgtgatagataagaaacaagtagcggactttaagaacttagaaatatttagtagttatacagttgagactgatgtcggggtatttgtttttaatttcaaacgggacagacgactcaaaggtaaacgaaaaagggataggtatatcacctattatgttgtagaggtagatgtgccacctgttcttaaagaacacaccaaagacgacggaatgactatgaagtcagtaatcgttcttaaaattattttatggaatatcaaaccagaaaccttggttagattactaagcgatgtttacatggatgtactcatagctcgcatacaagctaaaaacagttaacagagaccaccaccaccgggtaaccagtggtggtggatactctttattaacgtctttgcagtgacttcaacttcttatctctatctatagactctaacatctcttcaatagaaacagctccactaccattaccattattcatatctcttgcatacatacgaatcttaatttctaactttctagctatggttggattagtttcttcctcataagcttcaagtaagttattgaagtcacgttccatctccatagcttcttcttcgttcatctttctttctaaagtagcaaacttatcattcaagtagatgttgttagctctaagtatcttaccactatcaacaccatagacgtttaagtttacaccattagttagtaaccagaaagataacaaggcagcaataaccatatcgtcactaccaccagacgggtgatctattcgattgttcttaactactagcccagatagctgactaataatatcctggtctctagtgaggtgtgcggtgtactttaacatagtcattagagtaacactatataactctgaacgagctgtgacgccagcaccagacgttgtaaagcctatgtgtttcttatacttgatgaaagtatactcatcagaaggacgagcttccattatctctttatactctctaggatatttctctttattttgtacgattgtattatatagtctagtgtatggattaatatctttagctaataacttagtgatcatatagtcaataatactagcagcagaagaacgtctctcaataatcattactgaattacgatacttaagtaagaacgacacaaagaagtctgctaacgtaatcaagttgatctcgttaaacacagcagtaatgataacttcacctgtagtgtgatctcttactacgaaagtaatgtcatctccaccagctccgtctgaagtatctaccccaataacaaatgaatgaccagcagcttctcgttgagctaaatcttcatctgtaatgtacttagttattaagtagttgtgaggtgcataaaactcagtgtaaggattttcaacaacatgttctttaagtagttccaaatactcacgagggataggagatacgttactacctgagatccacatgctgaaaagatctcgcttgatgttctcagcagaagagatgttctcactaagacgctcttgtaaccattcttcactataacctaactgacgataactaagagagatgttaacgataggacgtttagtctgattcttagtagctcgtgagttcttgtagatattctctagaagttccttgtgatctacactgtcatagaacttctcgtttagacgagtagaaccagtaacaataccgtagatgtaagcaccatctctatcgtcaatgttacctgcagtagttgctaagatagtaccgtaaggtttaccattgacacgagcagattcacgagcagcgttacctgacatgagcatagcacccatagcgatagcgatgttctcaatgaaggctgcctcgtcaatcatgttaataggtgaagtaaaaccacgacctaccttctcagcttgtttaggtgaactagacgatagactaccctgaactttgttcttaagtaaatcaatagaaacttcatctccgttaaagatatctttcttagtagagaagtttaagtaatcaggtaggtcttcaaacatctcttttactttagagagtgtttcacctttaagagtttctgaacgagtcaagaagttaataaaggtgttagtagcaccaaagtttagaaggtatgtaaacagagctacgatggatgttgtcttacctgtttgtcgaaggataatgattaaagtagtaatgtggttaaagaacatccagtacaaaccaatgttagctcgattaccttggaagtgtattgtctccatactacctttaactgagatacgctgaacttctcttaagtaataccagaagttaaccttacactccataattatctttgcttgcgtttctatagttaagtttgggtcataaggatctacgtcctttaactctggttgtgtgagagctaataggaaggcacagttctccacacccatcttgttatatacatgagctaagtgtaagaatgatttgttttttgtttcataatgaatgactgcacgaggatacttcatccagtcgttagcaaataaaatggtcatgtaacagtctcctcatataccagacaattgaccatccttttcattttctaatataagttagatcgtttgacttattagaggatactcagatgttaatgttatatcaacaatttatcctgcgccaagctgtaaagaattcaatgtacttaattaacccacctgtgatggaagcaagtgagttaacagtacctagatacacagttcttcactatctagatacaacctcagatagacacttcccagatagagaactttattactttaaagagattgaaaagaataagaagatacctatattacacgtaactgacttgttgtataaagaagacgttaccgtattagagaacaagtacgtaggtgctgaagttcgtaaatggggacgttctaacattaagagttttagaggtagtgaccttgacatcactcctaactcatcagtaacagtgatcggtgtttataactacaaccttttaaaggatatgtataagtataaaacaacgttacttagtgactataatgaacaccagaacttatatagaacttactgggacactataaagaaagcagtggatttagatcaggagtctagacacttagtaactatagagttacccgtacatgtgccaagttataacgtcttgaaacgcctcattcagtttacaccagtgaagtatagtcgtgttgttaaagacgataaactcaaaactatcattgagttagttaaatggttagatccacaggaagaaggtacttccgtgatgtctaagattactgaagaggattccttaaagataatcattgagttcaagtataaaggttatagttgtatagttcctttatctactttaatgtctgtccacgagaagtctactttagaatcaagtataaagatgggccctattaaagctttgaagttgttcattgtctttcttcgacgtattcaagatcgagtagttggaatcactgataaactaggtgatcctttagagattgaagataagttagaagtagatcagactgaagagactacagacgctccagagggcgcacaagactacgagggagaagatagtggtgaagatgatgaaacaccaagctatcgcgatagaatccttcctatagcgtctctagctcctaagagagagttagttggtactgtgattgataagttatctgatataggatctgttcctgaaattcctaagtatcagtttaaccaaccaaagaaaataactataccagctatagctaataaagtactaaagaaaaaagatataagtgacgatgatatctttgttaatagatcagcagacatagacgtagatcaaatccttaaggagatggatgaagaagtagacgggatggatgagtactacgaacaagctatcatgggtggaggagaagacagtccagatacgtttaacgtggactatagtgataatcttcgagaagacttgttgagagacattgacttagatagtaagtacgagaacttcgtagctactgctaaagagtttaacagtatgtcttcttctgagttacgtagtgttagtaagtctaaagagaaacgtgctactcttaaatccccttatgctaaagacattgctttagatacttacactgtacctgataagtttggttcattgttagacagtgaggctatcggtctgaatgaggatattccccatgttagttctgtctataaacaagacgtacttaaagccttcgatgataactatctgaagaaacaatacaagaaagacattgttgctaacgtagttaatctagagaaagctggagttatcatcagtgactatgaagtagaagaagtaaacacttctactgataactatgaagtgcatcgtctatctattcgtcctttgaacggtaaagaatcaacagttctgtttcgtttacctaagatagatagtgaaggtaagatgcgttcaggtaacatcattactaaactacgtaaagttagaaccgatctacctatccgtaaaatcactcctactaaagttgccttaagtagtaactatggtaagttctttgtgtttcgcacagaacgaagtgcttacgatccttataagtactatgtagacttcattaagaattcttacttagacgaagatggtttaattaagaaagtagttccacgtagaaaaagtcttaatactaagaagttccctaacgtatacgctgccctaactagtgagtttaatgaagtacaaactgaaggagctactttactcctagactatgagaacagacatacctttgtagatgaactaactcataaagacttggagacgaagaacttactattagctgggtatttgaacgggaaaggagatcgtagtaaaaacatactagtagtggatatgaacaacaagttctataactacactaacaacatggagttagttgggacattagaagatgttctaggtatggacgtttctaaaacacctaaaccgtttagtatggttaaagtgttgggtgataatatcgcattaggtctagctctaagttactatgttggtttaaacaatctactagctatcactaagaccgagtttaaactactaggtcctcgtgaaagatatactccagagaaaggtgagttagttctaaggttcagtgatcataagttagttataataacagagagacaagagcaagagttattgttcaatggtttcttgttttatgagaactacactaaacaacacgaactagttcgctttaacaataaagacatttatctaggtatggtcgagttacgtaactcaggaatgattcatcttaaagaaatggatttgttacgtgagttgttcttagatcctattaccattgatgttctaaaagaaatggaagaaccacacgagtatatccctttacttttaaaagccaacaagttgttagagactttagatcacccggatattaatgatccacgtattagtcgcattcgtggttatgatcgggtccctggtctcatgtacaaggtgttgactgaatcagttagggaacatagaatcaaaggtagaaagaactccaagatagaactagacccttataaggtatggaactatgtattgtccgataacactaccaagataactgaagagactaaccctgtagttgatcttaaagaaaaggaagtaattactttcactggtaaagacggtatgagtgctagcgctataccgatgaagatgagatcgtatcacgaagaagatataggtttaatgtcagaagccactgtagatagtaaagacgtagctattagcgcttatctatctccacacgctaagataaagaacactcgtggtatggttttagataacactgacgagtatataaaagaaaagggtactgtgttttcaacctctgctttattagcacctatggttgagaacgatgaccccaaacgaatcaacttcgtaaatatccagaacggacacactatctcagcggttgggtatgttcaaccaactattcgaacaggctatgaatatgtcatgccatatcgagtaggtcctctgtatgcttctatggcagaagaagacggtgaggttgtttctgttactgataaacaactggtagttaaatacaagtcaggtgaagtcaaagctattaaagtaggtacacaatacggacgaatggaaggttcagtttatccacacagcttagtgactgatctaactccaggtaagaagtttaagaaagatgtagctcttgcatataacgagaatttcttcgagaaagattggttagattcgactaagctcttaatgaagtttggtaagaacatctccgttgctttaactgctaatgatgaaacctacgaagatagttgttctgtatctgatactttaagtgaaggaatgactacctctattattaaagagaagatctttattattgagtcaactaaaaacataatcaacttagttcctatcggttctaaagtagatcctaatacacctttgttttctatagtagatgaaactacagactacaataacttatctgaaacctcagttgacttactacagaacttagccactatgtctcctagagccaaagtctatggtgaagtagaacgttatgagattaaatataacggtgagttagctgatatgtctcctacttttaggaagttagctaacaaactagataaggatttatttgaagaaactaaaggcactgaatacgaagctaagaataatagaattacagcagagtatcgttcagaaggaaagaacttaaacgtagacactttagaactaaagatctatgttacagtacaacttggcatgggtattggtgattaactaaagtaactaatttacatcaactattatgtgaaaatatatggtagtaggtggttaaggtgtataatatacttcgcgtaaataaaagatattcgattgatcttcaaggtaatgttaagttagacgatgtcaaaattgtagataaagattccactgaaaaagtaacaattgagattgaaggtaagttatttaaactatgtcctatatggttgggtttaatagctcactatcaagtagaggtttctgttaaagatctctttaatatttcttttgtaaagtgtgtgagtaaactcttacgctatcggtgtgaaaataaaatggtttttaataaaccaattatctacaaacctggatttagggtagttcccgatttgatgagatacgctgtatctagaaacggtgaagtcatttctataaatacagacaggtctttaaagattcaaactggccctaatggttatccggttgtaaatctttacgatccagacaaaaatcgttataggtcagttggcgttcatatactagtggctagaagttgggttgtaaatcgtaatccaactattaaccacgttgtgaatcataaagacggaaacaaaactaactatcattaccttaacttagagtggactaacggagttaagaataacatacacgccagagatactggattaacgtcagataacattaactgtacactttacgacactgagactcacaaatttgtagactttccttctatctccgaagccgctaaagctataggatatattagaagttctataaagacaacaatagtgttgaatggagttaaacaattaaggttaatctttggtagatattatcttatccgaaaagactgtgagtttaaaattgaagatgttaaaacctttttagagtttaaaagaactgccaataaaggaccttacgaagtattatgtattaaaagtggggaaaccatgacgttaaactctgtaccggaaattacaagacatataggtataaatgagtcgaatatctaccatgctttaggtagaggaccaagttatcctgtaggagatttcctagttagagttaaaacagataaaccatggcctaaaccagttcctcgtaaggtaataaatcgacctgttagtatagaagctaggaaagacggtaagtctttagtctttaaatctatacgcgaagctacaacccatctagagtgcgacaagagtactataactaaaagacttaaaagtccggataggtttggtgcttatgaaggatggacctttaaaaaaatagttacaatatagtcctattacaacgaaacttgtaatagaattctctctaattgacgggaaaatccttagagctttatctaccaaactactacaggaaacttagtagcggctaacagtaatgtgttaggtacggtaaaaaagataaagattgggtgatccgcagcgaagcttctaaatatagtcgggagactagatacgaagaacgttcaacgactacatgacttaccatcaagtaggagtcagtgactccaaaacgggagacaccttagcgtgtgtaatgacgtaggtgaagatatagtctgttcctgaaggaaagcttcaggcggtgccgctctaactgatagagacaggccgggtaagcgtaacgaacttactggacataaagaaagtagtttttggtaaccaaatgaaatcagttgtttctgatgtatttagttctactattaaaacagaaagtaacaaaagagttgaggctttcttctcttatgacggtatcctacgtcgtgttgctaactcaccaatcctaatgggaactactaatagattgctaaaagaagctagtaaacaagtaacaaatatatactttaataagaagtaacgaatagaccgacaggttaacccctgtcggtctagcattttgtgaatgcattcaacttaaccaaggatagagtcttatgtctattacctttccactcgatcactcaggagtcgctcctactaacttagtaacaggcgaaatccatagcgtcaatgaggcacactttaaagactactttttccttgtgcctaactttgctcctttttacgtaaagaattttaaagcaaccttaactctaggcggcatcactactaacttagtggaggatgttgactttagttttgctctaccttatgttactggtactcgtgttactggttctgctatgtatggtgctgttactttacataacttagatatctcaggtttgattactattgaatatcagactatcggtggagatcaaataccagatagattacaagtattaactgagttagcagatagagcttataatccacgcactaccatttgggatatcttaactaacgtaccagacgcattaccaccaactcctcactaccaagactacaatgacttctacggtcaagaagaagttgtacgtgctttaggtgaagtacgtgatgctatcttaactaatagttctttaacacaaactgagatccttaagtttctagaggctttaggttcaggtgagtttagtaactacgttaagaagaccggtgatgagatgactggtccattactattagacggtttacctactgaagacagacacgctgtagttaagaagtatgtagacttaaactttgtaagtgatgataagttaactgctgagttaagtttgtatctacagatagatgctgctatagttgagtttgctactaaagtaaacaaaggtggagataccatgactgggtttctacatcttaacgatgatccagttgaaccaacccacgcagtgactaaaaagtatgtagatgatttctctactttagttaatcagaagtttgatgaattagatcaagatttggttgacgtcaatacagatagagtaactaaaacttatgtagatgatcgcattaatgaacttaaagcttatattgaaacattagcctcattcaggtattaactaaaccacaggacatcccgttgtgggtgtcctgtgtttagcgtctatagctggtaggagaatattaattcagtggagtttccacgactactaaaccggttagcagtctttcttttattgaggaattttacatgaaactaaatatttacggtaatcagccgatcattgctccacgtgatccagaactaccaatggaagtaacaactaagaactacgttgataccttagttggaactcactcttcagattctagcttacacattactagtgaagaacgtgaattgttaagtggtttaactattggttctggtgcacttaatcaactagaaggtttgactggtaacgtacaacagcaattgaatgctcgtgttctgaaagctggcgacactatgactggtcctttggcgttacctggtaacccaatggaacctttacaagctgctactaaacagtacgtggatgctgttgacactgctaaactaagtttagctggtggtgtgatgactggtaacctgttcttagttggtgatcctacctctaacttacatggtgcaaccaaacgctacgtggataacagtgtagctaatcacgctgctgatgatagtttacacctcacagctggtcagaatgatttccttgatgcggtaacagtgtctgctgttgaagttaaccgtttagctggtattgaaggtaacgttcaaactcagatcggtgaacgagttcgtttagatggtggtgtgatgactggagatctttctctagctggtctacctaccgttgacgcacacgctgctaataaacagtatgttgatagtaaggacgcattagctgttaagaaagctggtgacaccatgactggacctttggttctttcaggtaatcctactcttgatgcacaagctgctaacaagaagtatgttgatgagcaacgcgcttcacacgaagcagataaaactcttcacatcacagctggtcagaacgagttccttgatgcagtaacagtatctgctgttgaagttaaccgtttagctggtattgaaggtgatgtacaaacattactagatactaagtttgataagactggtggaaccattagcggtgacgttactttagctgaaggcaaaactgtctttgtaagtaaagtaccagaagtacagactgaagtagttaataaagcttacgttgattcacgcattaaaggtctgcaatggcgtgatccagttactgaagttaacttagtcagtgacgaattatctactccaccatcagaagcagttattgctgacacttatattgttgcagctaatgcaacaggtgaatggttaggtaaagaaggttacgttgtacagttccaagacgaaggttggaagttcttacaaggtcgtccagttcagaagggagatcgcttcggtgttggtttcactactgagactccagttagtggtggtctagttggtaatggtagtaagattgctactgtagtttcagtgttggacggagttattacttatagcttcggtgaacacagtccaagtagcactactttagtattcgatcctgacgctaaacacttcggtgttagttactcattcacagacgaaggtaactgggtagctacaaatacctcagctaacctgactccaggtgaaggtatgcgtttagacggtaacttactaaacctgaacctaggtgatggtattgctatcgtagataacatcattgctgctgatcttgataagtcaactggtcttgatgtagttgatggtaaagtagctatgaaggctgctaacccaacagttaagttatctgctgctggtgctgaggtcggtgctggtgttctagctgatattgctgatcgcgttagtaagacagttgatagtgacgtgtctgcggttgttactgttaaagctactggtggtttgcgtattgaatctcctgttcttgtaggtgctgatgcaactaacaaaacgtacgtagatggcttagacgctgctatggatttacgtgttgatagtttagagtctacagttggtgatttaactactgactcagtgactaaaggctacgttgacagtcaagatgctttagctgttaagaaggctggtggtgtaatgacaggtcacttgaccttgaacgctgatcctacctctgagttacacgcagtaactaaagcttactctgacgcggagttagctgaacacgctgctgatgatagtctacacattacaccaactcaaaacgtattcttagatggtattactattacatctacagaagctaactaccttgaaggtgttacaagtccagtacaagctcagattgattctagactgaaacgtgaaggggataccttaactggtccgttgaacgtgcatcttgctccagtagcaaacatgcaagtagctaacaaacagtacgtggacgaaggtgtaaacactaaagtaagtaaatctggcgataccatgactggtgcgttagtattacctggtgctccaactactactttagaagcttcaaccaaaggttatgtggattcagagattacttctcacgctaacaacacgaatcttcacatcaacgctggtgagcgtgtactgttgtctggtattactgttgactctactgaacttaatagtttagaaggcgttactggtaatgtacaaacacaagtagactctaagcttcctaaagcaggcggtactttaactggtgatctaaccttagctggtgctccaactcaaggtggtcatgctactaacaaaacttatgtagatgctggtctagctttaggagttaagaaagctggcgacactatgactggtgcgttagtattaccaggtgctccagtagctgaattagaagctgcaactaaaggttatgttgattctgaaaacgttactcttaaaggttatgttgatagtcaagatgctcttaagttaaacaaaactggtggtactttaactggttcattgatccttaaaggtgctccagaagctgaattagaagctgccactaaacagtatgtcgatactgggttaactacattaaaaggtcaattagaaaacgacgctggtgctttaggtggtcgagttactactcttgagggtgaagttgctggtctgttagtagatccagttacaaaagagtatgttgatcaagctgatgtgttgaagttagataagactggcggaactatgacaggacatctcctgttacacgcaaacccagttcaagatctacaccctgctactaagcagtacgtagatgctattgctcaaggtctagctgttaaacctgctgttcgtttcggtacttctgctccattagctgctacctacaacaacggtactcaaggtgttaactctacacttactgcttctgcaaacggtgtattaactcttgatggtaaaactgctcgtgttggtgatcgcgtacttgttatgcatcagactaacaaagcacaaaacggtgactatactgtacaacaaataggtgatgctggtactccgttcatcttgaagcgtgttgtaactgctgaccaatctgaagagattccaggtagctacttctacatcttcggtggtgatacacttaagggtactggttgggtattcactgttgacaatccaatcacattcaaaatcggtactgatcctatctatgttaaccagttctctggtcaaggtagtattattgcgggtgacggtctattactagaaggtaacactcttagtattggtactgccaactctaaccgtatcgttgtgagtggtgattacattgacttagctgttactggtgttactccaggtgaatacactaagttcaacgtagacggctacggtcgtgttactagtggttctaacccatctactctacaaggttatggtatcgttgatgctcaacctttagctaataacttaacaagtatctctgctattgcaactaatggtctagttattcgtaacgaagctggttcaatggtaactaaagaagtggctgtccaaggtgttggtctatccatcactaacgcttcaggtgctgcttcaggtaacatcattgttaagtctaatgcttctagtgctgcctctgtagatacattagttagtcgtgatggtgagggtaacttcgctgctaaccaaatcactgctgacttactaggtaatgctaacactgctactaaactcaaaacagctcgtgatgtttctatcactggtgacgttgaagcagcggctatctcctttgatggttcagctaacgttgctcttgcaactaacttaactgctactggtgtaactgctggtacttatactaaagtaactgtagacgcgaaaggtcgtgtgtctgctgctgagaatccagaaaccctagcgggtcatggtatcacagacgcagctactatcgctcgtctagaacaagaagtttctgatctccgtaaagagatgaatgaactttacttatatgtaatgtcacgtatctaaaactagataggactccctgggactcacgtctcagggagatcctttaacgtgcgtataccaggaagctctctaggagctccctggtagagtttatactcacatttgatactacgactcagatacagttttaacagtgttagaaagagaatcaacagccttgtagaagaacatagcgttagagtaaagataagcaactaactctacttctttagcaacggtatgtaatgctgcaatcaaatctttctttagatagttactgttcattaggaaaccagtcttattgttttgctctaagactagatcaaccatttcagatacttcttcggttagtttagttacgcctttaagaactgaaggattaattaacttctctaattcagatatacctataaagatctttggtatctcatctaagttattcaagacatctttaatataacctttagtagcattacttttactagggaaatatttagatagtttatcttgatgtatcttagtttgcttctcagactctttataaactaccttaccaaataagttatctgctttatcttcagagaactcgttcatgaaagcactcagagtcatcttaagagtacctaaagctttctctgtgtcaggtataagagcgcgtgatgcgtctgttaggtctttaatgtattcaatgtacttacctttaaagttctcagggatggtaactgagtaaggtttaaggttactgaacttaagacgtttgagtttgttctctacttcgaaacgactagacagaacatcagtgactaaacgatcgtcatctaaagagaagactttagtagtagcggtgtttaaggtgtcttttagtttgaagaagtaatcactaatagcttcagtggaaacaactgaagcagtagagtagtagttaacaaatgcttcttgggacaacgacattgctttaggttgttccttactaaacaatagcatagatatgttccttagtagttaaacatgagatggtatagactaacttcatcgttagtgtctatgtagtttagatctcttatgtaacgaggtaattcagagataccttctaagagtaaaccatagttagagttagtggtggttggttctactgtgttgattacataagtaacagctaagaactcaggatcagataactctttcttaacaccaacataaagaggatagtctacaacgttagttttagaaggaacgtagatagtaaagttagctataccaccattacagatgacactaccgttcttctgggtaaacaaagataagttgagttctggtttgtagagttcccagtaaagaacagaacctacagggtaagctgatgtatctatctcacctgtgtaagactgacctttaatccaatcacacttaggaacatcaatccaagtatcacttaagatctttctacgactgaggaagtaaagaagagcatcgtattgcaagagtttattgttaggtatgatcttaggtaactcatcacacttaaacttcgacagtagagagttcactagttctaggatgatagatgtctgtcctagagtaatagctctcttaatgcgttctagatgatctacaataggttcaaaaccatagatgtcgtctaagaggtgacggtgtatggttggtgtgaactccgttggtttattaaaaacgttagtccaatctactggacgttcatcactgataacagattgatacatgttagcaatggctttatcactataagtaaaatgaccacctaacgcttggtatgtgattgtgacttcagaactaacactggagttaataacaaggatgactgaagctatctctttaccgtacttaagagtagcttcttggtgtaactcaactatctgataatccataccacgggttagtatattagcaccgtctcggataactaagctattagcaaagaaaggtccgaggttagcagctatactacgggtaggtctgtcagatagagagtgtggttcatcaaaaatcttgttattaacatctgatccagtaatatctaagtctagtaccgggatgttatatgccatttagatttcctctatcgtttctaacaaagatcatctcgtgtttactcttctttagaacagctcgtacgagggcgtgtggggtgtggggtgcttcgtcgtctacaatataaccgatgttattgtaaaagttaccagcgagctctgaacaatagtaagagtcatcacttgaacctataccaaagatacccttaacaaaatcccatagaccgtaaggtttacctaaattctttagtaagaggtcataatgacgactgtttaattctagatctgttttgattagatagaaatcatctgtcatggaaataggaaacagtctaactaccggtggagttgcttcaacgatgaattgtctgtcaccaataatggctacgatagcaacgtgtgtaaactctgctttgaatattttttgatataggaataaaataaagtcgaagaatgaattaattttcgtagttttccaggctaatagatcacctgatctcaattctggttgtattttagataagagggtagtagacatgccaatttccttagctcaatgggacaatcatacaattcgggctttaaaacgctatgctttaatgtttgtttttatgatgtgtgttcctttaagtgcttatagtaacgggtatatcccaccacaagcgtttgactttaagttgaacattcaagaagagttagataaacactttgattatataccggactacaactatgttcctgctttaatagaacatgaatcctgtctgtcgctttctcatagtcgctgttggaactctactagtagattgaagactcagagagaggaaggtgctgggttagggattatggagaataataattggggattatagttaacattgagaatgcatatatagatgacatatttagatatgttgtatatcgtataaaattcccaaatggtaaaaattatatcggatgtactactaaatctgtttctgttagaataagtgctcatataaacattgctatgaattctaaagttagtcattataaaatatatagagccataaataaatactgtaaacatgtaattaatgtagaggttctagcgggttatttaacaaaagaagagatgtttactgctgaacgcaattacatagttatgtataatagttacgaggaaggatataattcaactatgggtggagaaggagctattggaattgttttgtctgatcaaagtagagaaaatatatctattgctcagacaaaaagatttagtgatccagaacaaagggaaataaattcaataaacacgttgaagtggatagaggataatccagaaaaggtaaaacttgctaacaaaaaaagaactaagactattcgtaaactttctgttagagaaaatatttcaaaaagtttaaagaaatattacaccaataacccagactctgttgttaagatgagagaggggttagtaaaaagatatagtgaagatgaagagttacgaatggatataagtgagagtttaggaggtaaacctatacttgttactgatatggaagggaagtttataaatgcttattccactctatcagaaacaagtagagaattaaatttaagtttgggtaatatcggtatggttataagtggtaaaagaaaccataccggtaattacaaattcaaaagaatagaaaggagtgagtacgatgaaattaagaatagtaatatggttaacacttagtctgtttagtaaaggtgtaatgagtcaaagtgttagtacctatataccaccacaggcgtttagttttaaagataacattaagatggaattagacgctcactttcctgacatacctaactataattatctaccagctttggtggaacacgaaagttgtatctctttaaaacattctcgctgttggaatagtaagtctcaatttaaaacttcccgagaagaaggcgcgggtcttggaatggtaactaaagctttcaacgctgatggtactcttaggttcgataccttatacgagatgcgtaacagatacaagaatgagctccatgacgcttcctggagcactatctatcagcgtccagacatacagatccgtatcatagttttaatgcttagagacgactacaagcgcttgtatgacatcaaagatgagtgggttagacttcatatggtagatgctgcttacaacggtggtttaggtggactcaataaagagagacgtacttgtggattgaaagctggatgtgatcctcagttgtggtttggtcatgtggagaagacttgtatgaagagtacaaagatactatacggtaatcgctcagcttgtgatataaatcgcgatcatgttaaagacgtattcaaccatagactacctaagtatcagagtcaatactttacacctgtggttaaggtagaggaagttgtagaagagatagaggaagaaattattattataccacctgtgtctcaggacttaatctttaaccgggttcccgaggtggttattaatagaattcctgaaactcctgaagagactaagaaaggattctttagtagaatatggagtaagttgttttcttctaacgtagataaacattggggtatttatgaagcgtgacgctaaagtaattagtagtaacctttacgagaaaggtggtaagatctactgtaaacagaaatgtattattgagttccctaaatggtacgctgataaagacttacttaacatggctgagttatctcatgtgtttggtgtgtttgctattatcattggtgagacttacagtgtgagtgttattcctactatcttaaccactaaccctttgatcgttaaagaggtagttaaggatggtgttgaatacactcagtttcattacggtaaagatgatcctatcttagagaacactaaagctgttaagaaagaaatggtgagttatagtttgtttgaaagtttctttatgtacagtaaagtaccctggtatattgagtatgatgacttagttagattgctggataacttagctaaacacgcaggtagtaagttaggtaacaacttgattgctaacgaggtgttagttggattcgttactcgtaatgctaaagataagaaagtttaccatagacaagttattaaagatccttatgtttacattgacttgatgaacgtttactatgcagtaagtacagtaacaaataagttagctggtaactactttcagaatgctattgtgagtgctatagcacaaaaagagaagactactacgaagttagaacaacacgcttggcgatagatagaacagactccatagagccctaaagctctatggagatctggtctttgtttaaatattagttgtattttatataagagtgtacttgtgtttgatgatcaaagtttatattaggaagttggaaattattagacccgtgaaaggacggtatggaaccatcgtaatattccgagtaatcattcttaccaccacggaattcagtgtaaaggatagagtctaaactttcggttgtagatacagatgctccccctagtaaatatattctactactagttaccactaaatcgtaactagataaaggttttggtaatttctcttctagtagaactaagtcgcttagtgagccatcctcgttaatttttaatctataaatattgtcataattagttaaattaattctaccaccaaataaataaacatattctttagtcactacacctttcaaataactatgagctatattcaaagaaggattagattgttcaactcctaatgaaccatcatcgtcaactaagaaattaaaacctgagttagtataataaccaagagagtaaattcgtttacctgtatttattactacctgatctagaatatgtttacttaaaaacccatcaattctccatggactaatcaacccgttttctaatatatctgcaacaactatttgattagtggatgttgtttctccctctggtgtatttgctgccccccgaaaaccacccattaagtagactttagagttagtgacaaattgactttgcgctccaaaattacccggtagtttatttgccattacactccagtctgttaaagatccatctgtatttatatcacaagtaaatacatcgtaactacctcgaccacaagtcatgtaaatcttgttttttagtacaaataatctacttagttgactagtactcggtaactttttatcactaagagtccaagttccaataacgccgtttttgtcaactggagcgtattgtatatcgtctttttgaaatcctccaaataaatataccatatttccaaccaaaagagaagtagctctagacgtgggttttgctaaaactttagtatctattttaaaatcaaaaggtatctgtgaactatcgttaaagaaatgttgttgcttccaaggttcaccgttagttgaagtaaggtctcttttaaacttatctccaataacagcgtacaagtcactatacattgtcttatctaaaacaccaccattacacttcaaaaagttaactggggtagtagagcttgtcttacgaataatatcacctgtagtaatgcggtagctattaactaattcttctgcttgtttcttagttaccaagtgagctgacttatatggatacaccacactagtcaaactaccaatcaactgcccacccgctttagttaacaatccagtcaaaccaaaaccagctaaagtagttggtttaccacttaacttatcccaacctaactctggaatatcagcactaactaaaacaccaccatttccaaccacacgtcctttattgttaaccgctactttattgtaacgaccaacactaacacctgtcttactaaatacaatctgaccatcttcattacgaagatcaccaccaaactcacctaaacgagctacatctaaaataccactaactacatgactaacatcaagactagataaactaccatctacgtattgtttagtagctgcttccatcgagtcttctgggttacgggacaggaacaatggacccgtcatcactccagcagcagcagtgaaattggctcggttaagagccatgaatggagtattaatacgcataactatatatcctctcaactgaatttaacctaaccaaacacaacattcgctaggttctaaagggaaaccacagaattgaatcaacacacataccttttaaatatatacagacattacatggattacactctttaagggagactcacgtgaaatatatagttgtctcagacatacacttaggtcacatcagaacaccaacttcacacatcatcaattctttcactaagacagtcttcactgagaagaataaagatatagatgtattctttatagcaggtgatctattcgatagactactagactttaactctatagatgttagagagatccttaagtttctagatacactattaacttactgcacaatcaacaacatcaaactaagagttctagaaggtactccttcccatgactggcaacaacctgaagtcatagttaagttaaatgaactgcgtgaaaacaaatgtgatctacgttaccacaagtttctagatatagaatacattccagagttcaacaaacacattctctatataccagacgagtggtctaactgtcacctagacatagaaacacagatcaaagagaaactacaagaacattctatctctaaggtagacatagctatcttacacggagcattcacttaccaagctcctatcgctaagtatgcaggtttcttatataaagaagattacttccttaatctagttcgtggtttcattcatataggacactaccacactcatacctttttcgatagaatcattgctcaaggtagtctagatcgaatggctcacggtgaagaagagtctaaaggttatgttaaagtagaaggaactaactggacgttcattgagaaccccaacgcttacgtctaccgaacgatcaacgtagtagccaccacaactatcaatacgctagacaaacacatccagcagcttcctaagggatctcacgttcgtttggttctatctaaagatcatccgcttaatatagctttccaagatgttaaacttcgttacttagattatcatatacgtaagcttaataaagaaacgttatcggaaagtaatgaaatcacatatatagcacttagtgaagatctagagatgtctgataactatgtattagacaagaacatacacaacaccttaaagaatctagttttatctaaataccaacttaatcaaactgaacagaataagttcttaggttatattagtatcttagaaaacatagttgaagttgaggaggaggctatttaatgaatttgctattaacaactagagctatgtctggattccctgtgtctataggaacaggtttagctctagagacattgtttcaaccaacacaagacgttacagatgaaggtagacaagtcactagaatggaggacttaacacagtactctttgtacgtgtttaacctatctacactactacgtaacttaataagtaccttaccttctaaagagttgtttcgtatccctcgtaaagagatattagctactctgatagatgagatggactttatcactaaccactttgatgcacagtctatagaagtcaagttctatgtacatacctataagtttgttaaggatgtgtataaagatccaaagtacttgaggaaaccttctactgaccaacaacacttagtagatagtataatggaatactgtcttgagaaactaaagaaagaagaatcagtctctactttccataaagatatcaagtatgagaaacaagacactgtgcttctcttcacacacgttccgtttgatctacttagtcacggtaggtttatgaaactagaccttttagaatctcacacaggactgattaagacacgtaaagattggtggtctaagtactatcctattcctaaagaggatatgtcgtttatgccctttcaggaatacgctttatctatcttcggagataagataatgtttaaaccagctcctttagcagaacgtaaagctcttctagaaatgatgagaaagaaaggtgtgaatcctttaacctctgaactcggtatgatgttcctgaataaatagagaagaacaactactactcccgttaagaagtagtagttgtttgttttctttacatcatgtacatgtcattcataggaatagacggtacttcaatagcttcaagttcagcttcagtgctagtagccataagagcactacgaatagtagctgtatcaaagaagcgttgttggaacacactagcgatagctaaagctaaagcgttcagaacttcgatggtaggaacagcgtataattcgttagagtgatcaatccaacctgtaggtaattcacctaaagcttggtgtgatactaaagcttgactaacacgagcacgagctagttcgtcagcgtcaaaagtacgaccatcatgttcgataggttgatctaaaatccacttacgataagtagccagttgatctaatttagattgtttcttcatttcaaaagaaacagtatgaactggtttagcgataacaacccaacgatcaccaacgacagttgcataatgtccttctggaatagaaggagcacgatcagttgtggtgtctggtggaagaattggattaccggctaagtcgatatcaatttcgatctcaactacttgaccagcaacattacgaaatgctttcataggaaaaatccccttatagtttaaaattacaaacaagaacattagatggtaggttcagaatattaaaacaggagcaacaccctcatgaccgtacaagcaaagttatacaagacatattacgacatctctaagctaacaatttggggtgataatgatccagataacccaggtaacaaaccacgtttagtgtttagctttcgcgatggtatgcctcgtatcaccgtatacacaggtgtaacaggtcctaatggtgtaatctcagcagctagtgactaccctaactttatggtagtctgtgatctgttagaagaagtagccaatggtccagacggaatccaatactcaggtgactcactatcccttaaatgggaaaacgataaaccaactaaccagaaatacgtaactggtactctttaccttggtaagactaaagaaggtttagtctatatcagtgtaatggctgaaggtaaacctaagattgtgtttactttaaagaactcagatttccatgcatggcgtgataaagataagcagccagtaccagagtctaagttatcatgtattatggctcgaggattcgctcgtatgttccgtgacatcttaagtcgcagtgctgtagattacaccaacgaagaatatgacggtggtggacgtaacttaaacgttatccgtgctgctcaaggtagcacttctaaagcttcacaaacagcgatcattgattcgtttgacaccgacgtacctatgtaataaccaatccactcccagtgacccaaaggcactgggagtgaatctaagacagtatcggggactaatataataacatatatagtaagtacatccacacaggagttctaaaatgcttagttacaacatagaaattagcgagtacggtattcatgtacttcgtgttcgtcacggacgagagagtttagagtatgagttatctgatatctacaaagaagatgaaactatatactcgttgtttaaacatgtaaacgaatacgtacagtcactccctaagacagtacaagctcgtatctttgaagtcttctcaaccttagataaaggtgaaaagttattcgcagatattcaatacacttatatgctagaagagaaactagctgaagtagtacagctcctcaactggcctaagtttaagatctggttatgtaataaacagtccgagttaaagatacctgatactattgaagtagactatgttaaagatcaagacttaaacaccactgcagataaaacttatgtactagaagagtatctaggtttaatctcttacataacgtttgtacgtgctttagccccagtatacttggactactacaattacatcaaacaagtaacacgtcaccactactataaactctttatgttgtttgtgcgtagtgaactatacagttgtgatgagattgagaaactacgtagctatatagtagctaaccaagaatctcttgcccctaagtatgaaggtttgatctttggtgttggtgtgagtgatgacgacgctattgatagtttagttggtgagattatctttcataagttatcaacgatagacttcactacgaaagaacacaacatcatttcttttgtattcacaaccatccgttacaaaagtaatcacggtaacacaggacctaatagtatccgtggtagttctacagttattcgtggtcaagaaaacgatgcgtcgtactttgaagaatatcgtaagacttctgatatctcaattggtacagtcattgaactacaacacgctttaagtaatactgaagctatcgttaactcattagggtatactgactttgactacactctttacaaccgagagttaaagaactacttacctgagtttctaaacacgagtccatctaaactacagatctatctgttaggttggttcttaggtgggtttatcaaccctagagctttgtcttatatcgaagcacgtaaagttgctgagttattgttgttagctaaagtagtgttgctacagaaaggacatctgtttatggctatgttcttaagttcatatcgcactgattttacaacgcacattaacgttattgttaagaacgtgttagataagaacttagtggctgagctgaaagatagttatagttacattatgggtgaagataaagtatccataatcgagaacactatcactgaaacaggtaaagaaatgagtaactcagtttgggttcctattggtctacctaaaggtatggagaatctaatctcacaagaaggctatttattaattccgtctgatattaacgatcagatttgtaagtacatcaaactcgtaaacaactaacacaaccagaggaacaacatatgttcggtagtaagtttattatagaagaactaatctatatccccatgggtacacataacccaatgttcaatcgtccgtatcaaattaacgttacagatcacgctatcagtacgttacaagatcgtatgtgtgaaatgaacagtgctattgttacccctgcaatgttgactgacttatctggagatatgttacagtctagttccgtggcatatgacactcgtattgatacttcatgggtatcgcagcgtcgattcattttcttgttgaaagtgcgtagtgtcgagatgggtggagtggagattctctcttatatccaaggttacactgagtacgatggtatctcagatcaaggacatattgatcttaaccttaaccatgtaatcaataacgttatcgaaacaactaaccaaataacccgtactccaatgggcgtgtctcagcgagagaagttgtatcgcatctataacgtaatgggttcagacggtgttggtgaatactacactcaacgtccaactgacatcatgcaaacaatcgaagctactgaacgatataacagctatcagatgtctgagatggatcagttccagttagctggtagcactatctctccttacaacaataagactgttggtagtttaactgataactccgttggttccgagttccttagtaagactttatcttcaggtatcttagcacataagagtcgagatattgtagttggttcatttgaagtgaatgatcagtcatccacagacactatgttaccagagcctagtatctccgataaccgattcattaaagcgttgtcagttggtaaaggtcagatggtaacaagtccattgtttactttctctcaactacaacagttcgataacaccatctacgatcgctttaaagtaattaacctaactaaggagtatgttgatgttaacatgttgaacactccagaagttggtgagtactggaaaggtcaagatcctgttacagttaaagcatattctctattagagagttctgtagccatggctgttaaatatggtttcagtaagctttactttgtagctagtaacatgatgaatccttcagcaggaatgactgtatatattacatacttccagagtttcatgaagattgatgatgctggttttaactctctgttagagatattcaaagagaagttctccacagatatctttatggcagaaacctccgctggtcgtatacctttacatatggaatgttacgtagacttactgggaactagtaaagttcttctagagtacgcaggatatccatctacctggtatactgtacctacaacagctaacagcgctttctctagcgtagtaactcctgatggtaatgcgttaagtactctagcagataacttcggtgcactaacacaagcattaaccacaagacctgatggtcaacaaaactttgatccttacaactactaggagtaattcatgtcacaactaaaccctacgatggacagattctacctgtctatcttagactacgctgggttagaatacacagaagctgttattcaacccaagtctaaacaaatgaacccaatcactgtaaatggtaaacctctcaccttaccttactttgataatctaaaagacccaggtgaacgtacggtacttcatctactcaacgaaaactacatcaaaccagaaacagcagtgtttgatctatataagcgtacactaactctagagctaaacttaaagttaagtcacttagtagttactcttataaacgtagcttcagatccatctatccaagctaaagctaagtcaggtgaactagttgacttgattggttcgttaggtgatctagatgtcagcgtcattgaaggttttactaacctattcaaagcagctaagaaagagaaagatgaaggtttcctgtttgacttccatctaaagaagaatggatctatcggtgatactccatatgcagctatcggtaaggttaacttccatagctacaacgagatgcaacgtgcgctagaagaccgttcacttgaatataaggtatacggtactaagctacgtaagaaagatctagtagcactcacaaacctcttcgctgtgatcttccctgaagtgcaatcagaagaaagtctagtagaaggtactgacaacaagatattccgttacttgaatatcttactcaagacttcttacttagtagctagtcgcatcaatgatctagctaaactgctggaagaattaaaagaacctagtctgaacgttgaatctctagtgagtgatcttagttggtcaggtgaattggaagaactgtacggtatggctgatgctatccgactgattcctagtcaaacagacgtacgtggcgaagcttctaataagttacgtgttaatgagtctaaagcaacagtagcaccacagactcaacaacaagcacctcagccacaacaaccacctacattccaaccaccaccacaacaagctcctcaatcagtagcacaacaacaagctcctcaatcaactacaccaccttctgctgaagatatcattcgtggattagccacacaacaacagatgaatccttggcagcaacaacagatgatgagtcaacaacctatgatgcctccacagcaacaagtccacttacctatgtgggcgcaacaagaactaatgaaacaacaaccacagatgcaacaacagatgcaacctcaacaatggcaacaaccgcatcagtatccacaacaacaacagtggcaacaacctcagatgcaaccacagatgcaacctcaacaatggcaacaaccacatcagtaccctccacagatgcaactacagatgcctgtagttgctccatgggaaacccaaccacaacaatcaggattacaagttaatccaatgttcatgcaacgttactaaccagtaacaaagagtagagtcccctaggcatatagcctagggaactcttttttctttagttaagatgctggtatcttaggtttgatcgctattctaaaatcatatttctccccattatactgatgaggatgagtataaccatttagatacatagtgtaaacatacaagtctggtgctatacccatcatcttaaacaacgagaacaaatctccctgatgtttataacactcgtccggagacactacctgagtttcaaacttatacgtattgttaatgaagtctagatagagtaaattgttatttaacacaacctcatctttgaaactataatcactattctgaaggttcttaagcattttgtaaccccttatctaatcaacagattagagtagtcactgaacaacctataggtacatatatagtaagtatgacagtgtagtattaacactattattacttagctataggaaactaaaacaatggaagaagaagtacagaaaccattaccaactaaaagtcaattagaaagtagacctattgttcctgtaaaccttagagactttaaatctaagataggagcttacacaataaaacattaccctagtggtaaagtttatcacggttctactaacaatatatatagtaggtatcaaagacacggttcccatcttagaacacaaactcataacaataaagctttcatggacttaatgaatgaaaaccctttagcttacattgaattcttccccacagatactcgcgaagaagcttacgatgtggaacagaaactaatagatcaaactgattcagaactattacttaacgcttcattagactctagaagtacaactaaaggtttgtggatgcgcgacgaatatagggaaaagtttagagaaggtatgttaggtaatactcacggtgcagctaacaaaggaagagttacttctgaagaaactaaagagttgattagacagactaagttaggaactaaactttcagttgaagctagacgcaaaatgagtaaggctaggataggtaatcaaaacgccaagggagttaaacatagcacagaagctaatcttagaaaagcagaagctatgaaaggtagagtccacaacgcagaacatgtagctaaagttactctacataaagttaagaaccgggtaagtattgatggagttatttacgatcacatacgtttagcagccgaagctattggagtagcgtacaacacagttaataaacgctgtcagtcaccagactatcctaattacaaattagtaccagtagagttaggtgtggaagtgtaagggaaactatcacagacacatatatagtaactacaactaacgcgtggtgtcttacatcacgctactcttacaaacagacaggagtaacacatgactacaaagagtagtaataagaaaacagagatccatatggagttcctagggacggctgcaatcaacccttttgtcgctaacaactcgagtagtcgtatggtaatggattctagccactttagacagacagtgcctttagtgtatccagatgaaattactatcaaaactgggatgtgttatgagctcggtaagtacattgatgatgttcgtgtagaagatgattctgttgtacgtggtgctgtgtctaagtatcgtgagatgaatctagaacatccacctgagtacgctttactaactgaaattgaacgccacggtgaacctttcttagacatcattgagatgcctatgtataaagcttctcatggtttctttggttatcagttagaaccaacgcaagagttctctgatattggtcacgcaagtgttctggctaaggatactatcctagctaagactacaagcttatctgactctggagcttataagtttggtgttagtgctaacacagtgttcatgtcacacccatctgtagctgaagatggttttgtggtatctcaatcgttcttagataagacacaattcacatctatcaccactcgcatcattgatctagataagaagtgtatgcctcttaatctatacggtaagactggtgagtttaagttcatacctgacattggagagaaggtacgtccagatggtttgttgtgtgctacccgggaacgatacgattggttatctgtgtctgacttgaatgacgctaacatctctgaaccagactacacttttgacttgttgacttatgttaacgtagactcaactgttattgatattgaagttattaagggagaacactttaaacctgagtatcctgaatcaatgcgagttcagttggataagtattatgacatgtttattaactactgtagaaacgtagtgaacagttatgagaacatccttaaagagaaacgagctatgtatggtaaggacgatgctattcgtttgacaccgcgtttacatcgtttcttgactgaggctaaggtacatttgtctttagctgatggtgggcgtaataaactgtcttatcgtagacaacagatagatcagtatcgtgtcaaggtaactactatgtcagtggttcgtcctagtcatggttttaaaatcactgatattcacgctagtaagggtgttaactgtcacgttttgcctgatgagtttatgcctgtagatgagaatggtgttcgtgctgatgtgattgcagataacacaagtaccatctcgcgtatgaacttaggtcgtgcttatgagagttacttgggggcttgtagtcgagataacagaacaagattgattaattactttgtacctaaatatggtcagagtgtggaagcggtggatgatgctgacttagagtactttcgtaactatgttacgggtatgtatgagttaatcaatcctgatatggttgagttccttaatggattagactcagatggattaagagcacatttacactcagtgttgtttgaggacttgtacttgtacttccctccagataacgctattaacattgtagacgtgattagacgcttagaggaaactccttataaaccacatcttggtaaagtgagttacatggatgacttaggtaattatgtaactacagatgaaaacattcgaatgggtaagttatacttcttagtgttagagaagatagctaatgactattcagctgtgagtagttcacgtgtgaataactttggtttccctatccgtactaataaccgtatagataagtttaagtatccacatagcttagcaccaactaaaacgttgggtgagactgaggttcgaatcattactagttatactccaccggagactatagctgagttagtggatcagaacttgagtttgactacacataaacaaatcattaaacagatactggagagtggtacagcttttgatggtaatctacatctagatagaacagctaatccgtacggtaactctaagtcgttagctgtactgaaacacatgttcaacgcttctggatttgacttcaccaagagtaacgattaacaacaacctcccttacatagagggaggtgttttaactggaggtaatgttaagtggatctaaacgctagagagatattcaatcaaccaagacagatggtctgggatatacctgatggtttacatgaggttatgtacgaagatggtatagtgaacactgagaacaagaaagacttagtgttgaatcgttatgcttgggagatcatgcagttgtatcctaacactcctatagatagcgtgtggagtgtgagtgctattgtgggtgagggtaactttgactctaacactgtacctaagttattggaagctatctttaagcaagtgtgtgttcataataacattcatttctataaagataaagaaccgttacttcggttagcttaccagacaagcaattggatctttaatgaagtagtacatcgtatctctagtagtgtaacaactattgacgcggttgacttcattaacttagttaacgataaagagattaaacaaatacataaagacttagaaccttctatacgttcagtggagagtacgtacttaggtatccgtaactttattaaagcaagtcctgtaactaacagactagcagcagcctataagtctaaggctgttaacgataaccaagctaaccagtgtataggtccgcgtgggtttgttactgacttagatagaacggtgtttagacaacctatcttgaatggttatattcgtggtatgggtgatctgtttgagttgttagcagagtctcgtacagctgctaagtcactgaacgcacaagagagtcacgtacgtatttctgagtatgcttctcgtcgagtacaattattgactatgactgtagctgagacagaaccaggtgactgtggtagtacagagtacatggacatgttaatgactcctaaacgactacgtaatatgattggaatctattatatagatcctgatagtaactctttacgttatctggatggaactgaagaacatctatctgaacaaatcattaagatacgtactccgtttgggtgtaaacatctcgttgagactaaagtgtgttcagtgtgtttaggtaagatctctgagaatcttaaagagaactcaaacttaggttacacgatgacttcattcttgatggagaaactaacacaatctattttgtctactaaacacttgatcaggtctgttcgtaagacaatgattcagctggaaggtatggcagtaaagtactttaatattaagaatggagatgaatactatctaaataagaacttagacttaacccacttagatataatcctacccggtaaccgtatgggtagactaacagatatacttagcttacaacacaccaacgtttctttaactagagcaggtgagttagacgctattagtatacgtgataatagtaagaaaacaaccttcactgagtctgttagtatatcatatcgagatcgtgaatctgttataactaaagagttcttggactacattaagaagactacgtttgaaacagatgctcgtggtaatttcattattcctctagctggatatgataaaagagaacctatctttgttacaccgttgaaagaagataacgtacttgcttttgttaataagattgcagatgttattgagaagactaagactctgaaaggtaaacctgtttgtccttatgacaaatatgtagagttgtttgatatggtcttagaacgatttgagtgtaacttaactgtagttggtgtaatgatttatgctattacagctaagaatgctcttgacggtgactttagtctaggtagaaactctgttaacagttcttgtgttgacgcagctacattgtttagaagtcgtagtgtcagtcagttgctggtatatgaacgacaaactccagaactcatcaagaaaccaatcggtctcttcaatgctggtaaacgaacggatcatccttttgatgtcctattcatacctaatgagatgctgggtacatcataacaaacagatagagtaccttcgggtactcttttctttcacaggagatactaacgtgtctgttaaactactcaagtttaatctgtcggtctgtttagaggtaaaagatcctagattaacacggatggttagtgacttcttagataagttctatacctccaaacaacaaggttttggtgctaatcaagatacagacgacaagatgtttgctagtcgtgtgaaaaactctggagtcttctttttacacaacagacagtttgctcatctatatcactatttgaaagaacaaggtattactttagttgctgaagaggtagaagattacagagattacatagtaaagaagactaaatacaaagtaagagaaggttggaagctacgtgatgctcaagtgccagtctctgagttcctgttagacgatcctagtggttctaaactagtaccccttgcaactgggtcaggtaagacagctacagctctaatcacactaggagctctcaagaaacgatttgctattatcatcctaccgttcttaatggataagtgggtattagatatagtagagattcacgaagctaatactgaagatgttctgttagttcaaggtttcaaagctttagctactcttatagatatggcaaaagaaggagatgttaactgtgattactttctaatcagtaatagaactatgcaggatttcattaaagcatatgaagctgatccagaaggttgtatagagatctacggttgtagtcctattgaattgtttccgttgttaggtattggtgttcttctgattgatgaagttcacatgtcctttcatagtgtctttaagactctaatacatactaacgtagagttccaaataggactctcagctaccttactatcagaagacccgttagtaacaaggatacacaacgtagtatataagaaagaaaatgtgtatggcgataggatgatacagaagtatgctgacgtttatcctattacgtataacatccaagaagataagatgcgtttcattaagacagctaactatggttctaagaactattcacatatagcctatgaacaaagcatcatgaaaaaccacagtctattacaatcctactttaaactcatagagtctgtagctgaagattattttaatcaattctatatggaaaacgataagttaattatcttcgtatctacaattaaatttgctaccatattaactgagagaatggaacaattctttcctaagttattggtatcacgttactgtgagaaagatctttacgatgagatgattaaagctgatgtgattgtaactacagttttgtcagcaggtactggtttggatatacctaacctacgtgttggtatacagacagtttgtatttcatctactgtaatgaacatccagagtcttggacgtttgcgtaagcttaaagacagagatgttaagttctgctatctatacactaacaacatacctaaacagtatcagtaccatcgtaaacgtatggagatatttgctgatcgagttgctactattacacaaagacgtagtagagttgatctacgctaggggtaactccctagctttctttttttcttggatgagtttgagtatgtcggatactatagaaaaacagttgactaggtatttagctggtgttaaagatgaaggtttaaacgagatagctaatctgatagacttagaaactaacttcttgaaagctagatggcaagtgttatctaaggtagttccacacatggtctttgttaacggttatacgttagagattactacctgtgaagaagctggtgatattacatatatcttcaataaaagaactacaaaagaaataactatagattatgaaaacttctatatagatttcataagtaaagaagaagaacagttgggtagagtgcagttagtcgatatagaagatatcttactaataaacagtgacactggtgtgctacatgacctatgcgacatcttaagttttctttcagacgagcatgtaatgccaacccagaaaccagtgactgataacatcattgaagtaaactttaaaacaaagaaactaatgtaaagggagaaatgcatgtacagttattttggctcattagaagaagctaaacgttacggacctattcttacaggtaaagtagaaggtaatggttctaggttaatagcaatcaataactatatcgacgatatttctagcaatcgtggtgtagttactagtagcttagtaatacgtttaagtaaaagtgctaagtgtaaagtgttggaaatcaaactacctttcttagttaagaatgaatggtttattcgcaatacagataacatccttcatttaaacggttttggtaagaataaagtaattactctcttctggaaagataatgttcacgtgaagactgaaggactagatccctctactggtgatgttttactagaaactgaaagtgccttttatcttaatagttgcgaaggtgaattcattagcgattactatttagttaagaacaagaacagtgataaagagataggttgtaaagcacatatgtgtagacatacctaccgtagactccctaactatcttaaatatctgggtatgttactaccaaaaatcaaagttgaccgtatggaacttaagttcacagatgaagtaggtcctgagtctggtagctggaaaggtggtatatatagtgctagtggtatgactgtctttaaagaagagaacttacctaaagctgtagcgcgttaccttgataagaaacaagttacaattatacgcaagttaactaaagaagagtactacgctaagttccctgaaaagaaacctgagaaaacaatgaattacactggagtaaacaaatgcgattgatatcaccttctgtagagataatgaactacacaccaaacatggaagctactattgaagaagctattcgtacttgttataaaagtgaagataagatctgtgaaggttctgctaacaagatcattcgtaacatcatggatcgtcaccacgaatctactatcgaacacgctttaattaccgttcggtttgtatgtgaccgtggtgtaacacatgaaggtgttcgtcaccgtcttagttcattcagtcaagagtctactcgttactgtggttacgataaaggtaagttcggtaatgagatcagtgtgattgatatccgtggtggattccctaacatgggagctagatttgatgtctggttagaagctatggaagcagctgaaggttactacatgaagatgaaggagatgggggctacttcagaagaagctcgttctgttctacctaactctttaaagactgaactagtctggagtgctaaccctcgttcgtggcgacatgctttccagatgcgagtagagaactctgctcacccgcagatagcagaagtgatggttcctttgttggaagagttcagttctaagtggccagtattgtttgaagacattgttgtaggtagtaaacaccgtaggtttctgaaagatccacaaacacatatatagtacctagactactgagctattcatttagctcagtagcttactaacacattttaatataaggtaactgttatgtcttgtaattgtgagttgaaagaagtagtgtcaaaaaaggatctagtagaccgacttaaaaagctagttgggggtgacactcaagatcattttaaatacttctctccgatgttagtaactaaacatcttgaagaaaaaaacaattcttctaaatctataaattaggaacatctatgtcagactcacatgaagaacgagtgaaagcattgaaggaagggatgttagttaagattgacgatctagatgaacaaatggaaaggttaaagaaagaaatgcttgctaagattaagagtcttgaagaagacgatcctatgcgtgaaaggtttctaggagtgtatgagttactagaagaagaatctcctcaagaatttgaagagaagttaaagcaagctgaagaaataaataactcaatcgtgttaaatcgagaaactaaacgttagaggttcctatgtcagagaaaacagaatctgagcacaattggtctttgagagaagaacgtgctgtcctagaacaagcatttgagcactcctctaatccgaagaaattgaagaagtttgtagctaatctatacaagaaagttacaactgacgaagctcgtttaatgtgtcaggatatctattcctctaaagatcctgtaaagtatgttaaagattccataactagagttcgagactttgctattctaatcgaacagtttatggaagacggtaaccatggtgctatcatcactggtagtggtggtagagacgtttatcctattaaggtagatgccttacctcagtggttaactggagacgatccatggactcaggaggacgaactagagatcatgcttaaagctacacgtggttggatgcaagagtataataaagattacttctacggtaagatagtgttgttcccttactttggattctcaggtatacctcgggtttacgagttaacagctaaataaattaagataactactagtcaactacccctacccaaaggaaggggtctctgtagagtaaattccgatgaaagataaacacgtaatattaacaggtggagttcgtaaaggggagtttacagtagtatccgctagtactccgcgcaaggtagctatagttggtggagaacttagtataccgttaggtgactacaccgttgagaacaaaccaatctttaacacagctttcagaacacacactgtaaacactctactctatgacagtatctactccctcttgttaagtagtagagataaagaaatagcaatagaactcactcaccctgatagagtagtcgatttaactttacatcccaacggagatctaacccaaacagatagcgatgtgatgcgaggttatattgaggataaccttatatcagtaaccaaccctaaaaccaataaggttacactcactgttaaggtctctaaccataaactaaatatcagacgctacgacaataaacaaattattggtagtgttaaattaggtttgaatatcagatccgaacctacaatctttattaaatacaaggtttaataacatgactacattaactaaagaagatataaacaataacttcatggtagatccgaagctacgtaagaagcttaacacatgggtacagcagtactataacaacgtaacagatttaagttatattgctgctggttattttagtaacttcataaattgtcattctgacggattctttcgtatagcatttgacggagattactttgacgttgatactctagaggactctgtgaagactctacttaaagttgactctgaacagaacaccttgttagttgcagctggagactgtgctagtcgcgtctctgatagtggtaagtttgttattagtatagaaggtctaggtgtgaaagttcgtctagtgatagacaccctggctatagaaacaatacttcacgagcggatacctggtgacactggtttagattgcggtaggatgttaaacgagatgcttgaaagtaatagtaaattaccagaacgcaaagttcaagtaatcgttaagaatataaacaagtaggggtagcacatgtacagtgaagacatcttaaataaagtctctgttgaagtattgaaaaagattcagggagagtttggtattgaggtcagactatcccgaggtcacactggcgaggtttggagtgaaaacttaagttacatagttgatcttcttaacggatcagttaagaagttacttgtgtgtttaaaggacaacactatagctgaagtatacgttcttgaaagagatgaacatcgcttagtcattagaatagcacctactgataagaaactagattctagtcgcttggtgtttgaacttagccatttagttgaaaacaaagaaagttcttacaataacgagttgttgtgtaagctgtcaattcggattattaaagacatcaaacaaacagtagagacaggaactttaagttacgaaaatatcagcattaactcgggtataactcgactacctttcactaaggaaacagtagttaatttattatcccagactagtcttaaagtggtggtaaatgtaataagtgatagtctagtaagaagttctacttggtgtataactttcactaagaaagaagatcatctgttaatgaagttacaacgaactttcaatacaaaagttcatgaatttagttacgcactagcaaactacgttactattataaacgaaacttctgaaactaatgaacaattcaacactatgttgaaattaatcagaccgtatgaaacggatcgcttaacttcagtcaacatgccctctaaccgatatcctaaggaagaaaacgtgattaaacaagaacaaggtttgccttttgacctagaacagttatgtaacaaggttagtaacacatgcggttctgttcactcgttaaaggaaacaataagcgctatcacacaaaaccaagaacttacagttcagctagaaagacaaaagacacgctttctgctagaagtaaccggtgatattgtttctaattggaactcagctgtagagtttcgattctcccctgacttacctgtagaatctctgttcttacatttcccagaaagaagtgtagatctgaaccgatacgtagttacttttctaaacaactgtaaactaaagtacattcataaaacagatgttaaagaagaacattacttactgagtgtagagttagacgataaaacttacaacgtaggtattcctgttaacgctgttgatttcatcaccattctatctgccttcggtggtcgagtggagatcagcactctgttggatcattttcgaaagtcaactacccctacctaaaggaaggggtttccatggagtaaacaattatgaaagatctaggtaagataaactacaagtacatcaaagacccagaaccaactaaacaagaaggtttgtgtgtggttgtagtgtttcgaaaagatataagcgtcttggaagatttacttatactaggtatgtgtaacactaatttaccaagtaacgtccttaaacttaaaccttgcaagttcaacttaactacagatgttgagaagaacgaattcattctagatatagacactgagattcttgtagactacaagatcaaatgtcacttgttcttagttgacgaagtatatctagcgttaccagatggtcgtaaggtacataacctttacactaaactttaaggagtataacatgactcacattgagaaattgagtaagttgatcttagatgacaataagatcactacaatgattagcgatgcgttaaaagaacggtatcgtttagagttggcttatctaaagactgaagataagttacaagaattagcagacgccatgattcttcagttagttaataactggaaccaaggggctgttattacttttaacaaagaagtaatagtagaagaacacttcacaggttctaaagttgtaactattgatatcgtaaagaactctgtaactacgaaggactctgtgcttcgcattgacattgacactgaagttagtgaaggtgggtatttgattaccatcttccgcgatgatgaagccactcgggttaagtgtcaccgtgactttattaaggagattctgttgatcactgaagatgatacacgcatatctttaagtgaagtagttcttaacgtaacgaaagagctaactgagaaactatccaataaagagtagagcgatatgcaaccacatgttttctttgtagatggacccaatgctgttggtaaagattacttcattgaaggactaactaatactattaatgaactacacccagaagtagaagttattaacatacgagctacagactatctccctaagaaggtggtccgtaagtatgaaaatgaccaaactaaccgtgtgttcgctgaagagatcttccgtggacacattaaactactgtgtgatatagcagataaagctaaagagaatacagtaataatccttaaccgtaccttgattacttacttagtctacaatgtctaccctcgcttacaagctctgagtgaccgtgtggatggggattacgatgaggtacatagtagcattgaaatctacggattactcctccagaaggttctaccggacgcacagactacctttgtgcgtttagatctacctggagattcagttcaagcaacagaagatactattgaacgtatgttagctcgtggtgagtctaaagaaatagacaagacatgggtaagatacttaatagatcagttccgtgaaaactacgatacacattacactagttacaaaaactatgtacattgtagtagtgaacattataaaatagtagctaagaaatacttagtcaactaactcaacgaaagttattattcttaacatataggaaacataaacatgttagacaacttagatactcttgaaattgtagacgacgaacttgtaaagaaaacaaaaccaaagaaagactacactaagtattactattggttatttgctctcttcattctaacttcgatctttggtgtattagctaaagaagctaaagactcgtttgttagtaaaacagtagtggatgttcgtccctgtgaatacaacgtgaaaggagtggaggtcaaaggtaaacgttactatacttataagtacaacgaagtgtttggtattcgtttcattgatacctctaagattggtgaacgcacggatattctacatgagtttaaaggaactacaattatcggtatgaacgactctgaatggtggtcacttaacttaggtaaaggtgaacccactattaaaacactaggtaaagcagagtcctacacttttgttcaagatggtttagctggagtagtaagctatgacaacttctgtaaataaggtagatcacgtacaggaagacctagttaagactataggtattagtaaacgacatagtaaccgtgctttagtcagtatgtctaaactgattagagctaaccgtgaaatacttagtctagttaacacctcaaaagttatctataataacctgtgggtagacttagttaacaagtggtcttctgttggtactgtagagattatatttcctgaagacttcgatctaatagctatgttcgatgttaacgaagacttaataatcaacttaacagaaaactctataagttataaatctaaccaattcatactgggtactagaaacactagtgaaggtaagttcattactatcacgggtaaaaagaaatataaggattatcttactacctttgactctgaattagtgatggacgtaactttagtttggatggatggatctaacgcaacgttaatcagtgtaactactttaatagagagttaccttgaagaactaaagtcgatgtaaagaaacaggagagaggggattattcctctctttcttttttcttttttataattagctgtatgatatgaaatcattaccctctttgtcgtgagatatatacatatggatgcccgaacaatcttatccaagatcattgccctcatttatagaactagattgttaggtgagttggagaatgatgaccttacaaaaacggtcttaggtactattgaaacagattcaccggactttaacttccttgggaagaatagtgtaaagagttttaaagatctttgtatgtcgttgttagaggaaactgatcctattcctaaagaagtgttgatacctcaagtatccattgttttagagaacgatcctaagttgttgaaagtggttaaagattctatcgaacaagagtatgatgactcttcaagtaaacgtatcatcactaacatcacaaagacattaaacaactactaccgtgaacagttagctgtaggtattttatctaagctaagttacaatctaaagtttaaccgtaacaagatcggtaacttcggggattacttacaaaacgctatctctgaattagaaccattaaccactgtagtgtcttctatgaaagatcctgctgtagttaatgagttagactttgagaactctgagtctgttgagaaagtctttaatgaagtaaagaacttaaataacaacaagagcgtttacaagaccggttggcaaggtttaaacagaatgactcagggtggtattcgtcgtggtgagtttgtcactatgggagcactacaacacaagtataagactggtagtacattgagtatgtttatgcagatagcattacataaccaacctatcgtaactcctgaagaggcaggtaagaaacctttactgttacgtatctcttttgaggatagcttaactaacaacgtacagttcatgtatcaatacttgaaagcggtagatggtgaaatgcttaaacctaaagactttgagtatttagatagtaaagacatgactcaatacgttatgcagaaactaactgctactggatttcatgttaagatgatgcgggtagatcctagtcaatggacttatagttctatctttaataagatactagagtatgaagcgcaaggttactgtgttcacttactaatggttgactacttattaatgataccgactacagggtgtgtacaaggagctacaggagctgataagcgtgacttgatacgtcgggtacgtaacttctgttcagcgcgtgctgtggcgttcctgactcctctacagctatcaactgaagctaaacaactaacacgtaacggtgtacctaatcacatgttcttaaaagagattgctgagaaaggttactacgatggttgtaggacagttgaccaagaaatcgacttagagttgtatgtacatctgtttagtcataagggtaagaagttacttcagttccaacgaggtaaacacaggttacctacagtgataccagatgaagatcttaactttatgttacaatttcctggtttaaacattccagtgttagaagacattaacggtgatgatagttcatttactcgtttacctactggtggtgactcttcaggtaatagtgggttgctagacgagatcttagggtaatattttggttgtatcaatagtctatttggagtgacaaaaatgaagtttagaaatgttttcttgggtattggttctatcttaactatccttgtgttgttcttaagtgatccagatggtggtttagttcaaaaccttccatttggtagtggtactgtttcactgttgattatgttggttattagtattctttacattggtctgttacacttagctcgtaaagctttgtttgactatcttaacttagaagcatactttaagaaagcattgttaacaccagaaggttctggtatggctttgatctcagtggcgatcgcgatggttgctattgctgtagttattctagctgctacaaattagactgtttaataccctcctactaataacagtaggagggtttctttattggagtgaggttacatgaaagctaaatggtgggtaagactctggacttacctcgtagggttacgttacaaagtagtaatggaatcaagtaaagtattagaagtagtatatttagacgataacggaaagaaacagtgtgaagtagaatatgattgcactaagactattaaagacaaagagtctctattctttacttacgattcagacggtggaatcattagtatacgtcggataggtaaagaggaggttgtagatagagtactacgcatccaaacacctactaaagttaaagtaagtaattccttaggagtcactgagaatatagaagctcgcttagaagtagtgacaactaaacactggtacactatcttgggactattccgagttaatctacctatagaaactacaaaaatagtagagttgtgggttgaaggtaaacctgtattccttagaggatatagttccagtaaaagtaacaaaggttctattaacttaaccattagagaatactgtatggaacacggttttactagtatagttaatagtaacgaagaaggtactcacaaccaactagaaacagtaactcctcctaaaagttatagtataccctggcctccaattttacctaacgaaagtttagaaatgcaagcagctagaaaagcagctcaaggataagaatatgttgtctagttttagaaatctgttaagtaacataattagtttacagtgtaacgttaaagaacgtgtatacttgaacacacataacaccaaagcttgttctgttatgtacgatcaagaccttaacggagatcctgacgtaggtttacttcttagttacaataagcgtggggaattaagcggttgggatcattcatctatagagttcatactcaaaaaagcttatcaactacaagaacctttagttatagaggttgttgatttacatggagagtatactgatctggacatcagagtggaagagaacacaaacgaaataagattggtattcttttctaagttcacacttaaactatttaccactaaggatatagttattcgtattttaggtggtcgttgtcctacttgggctatgagttatccctttaacaatagtatagctaccgttgttcttgacgctttagctgagtattgtgaagcttatgaatacagttctatagtagacactggttgtactgtttctgaatagaagataggtacatatatagtacttagatatccactcctactcattgactaaagtttgtgagtaggagactacctaacaacaatcccccccacccacaagtaaacgttaaacaaggaagcaataaatgcttattttgaatcaagaactagaaccaaacatactcaaggctactgtagaactacctgaaggtaaggtaatacagatacaaatacaagacgcaaaactttcagcggtgaacggttttggaatggtccactatctaacaggtgacgaagttgtcctaattcttaacaccctaggttatccgtatggcagtgttagtggtttagttacagcgcctaacgctatctgggagattaattgatgaaaaggtacatcactttagcttcggtactttcagtggtgatgtcaacaacttctattgcgtcttctaacgacgtgagtggagttacaaacgtagtctacccagatcacgacccaaaggttatggtagagatagaaacacttcgtagcgtgtctatacaagttcacgctggtgaagatgatctagaactacagaacatatctgttaacaaaggtaactgtgttatgtctagtatagttactgttaacgataaaagaaaagtattccctgttaaactaaatgttaacgaaactgctagtgttcagatgcttagtgattgcgaagtattgtttctagatgtaactattaacagtaagaaactatcctacgaaataaacactgtagaaatctaaaggtgcattatgaaacttaaagtcatactagaacaacgaactacattaaactctaacgtagaaaacgcagttagttctaaggaatacattcttaaggaactcaaaggtagtaagaagtttcgattggaggaaactcttatatcttctacgccagaagaatacaaagatgtctttaaacccaaagatcaagttatagctataactgatttaacttacactgatagttcctctccggaagaaggacctcagtgtgggatgaaatacattaatgaagttttagcttctataaagaaatacaacagcataaagttactaagaccaacgcctttgttctaaaagaaatctaaacctcaacccactactcgacacaaagttgagtagagggtaacttaacctaaagagtaaaaaacgatgaaaaagatcctagctatgtttgcaattgttatgtcatttaacgtaatggctgatagtgatgtggagaaatgcgtcactaagaaaattgaaagtttccataaagtaatgggtgaagacgaacctatctctatgggtatgttagaggagtgggagtacgaatgtgatctaggtggatacactgactacgttgatcctaacgcagagcaagtagctgatcctgagattaagttgtacattgaaccagtttatgtggggaacagtcttcgccatatggtaaaagtacaaagtatggaaaacaacttaatcgttaaagagatgattattaatcgaggtaattgtactgtaggagcagatgctaagaacggtcactacacttataagttacctgtaactcttaactacggtgaaggtattagtattccagtaataagtgcctgtgatatcatagagattactttgaaacttaacgatgtagaagtgtcatataacgtaaactaaagttaacaactaagaaccaccacccggctttcgctaggtggtgggatacttaatgtagagagaacataaagatggaagaagtaaagacagaacatcagttgcgtgagttaataagaactaatccgggagcagtaaactgggataacgttagttaccatcagactctatcagaggaattcatccgtgagttccagactaagttagattggtatggcattagttttaaccagaaactatcggaagagttcattcgtgagttccaggataaggtaaattggagaggcgttagttaccgacagtccttatccgaggagttcattcgtgagttccaagataaggtaaactgggaacaagttagtcaacaacagactttatcggaagagttcatccgtgaattccaagataagttaaatcttgagattatcttcaccgttcaagactacagtgaagactttgagctaatgaaagtatacacacaaaacaaccctgacttactcagggtgactaagatagcaatcaacaaagaactactagagaaactagaagcctgtgaagatggcgttgtgtgcttcctagaacacactaaaccggatgaatctatcgactggttcgaactcaagagacgacataaatggaagagtgacttgtcttggttgtttgagagattagtttagagacaactaagaaccaccacccggctttcgctaggtggtggtttcttttttctttcttttacgcagttacagttatgtatcctgataggttaatcttctcaggtttgttattagtcaacactctaactaagttagccacgaatctatactgatgtaagtttagattgacgtgtgtgttacctaagtgtgggtgtatctccactaagttatctggaaggttagctctgatagggtctaacttatgtagtagtttatagtcttcttgattcaacaaatcaaagaacaccgtgtcgtcatacggattgatataagtggatgcaggtataacacccattaacatttcatgtattactctagacactactggagagtatagatagtggtgatctgagatgatgttaaactcatctatattaggttcaggatagatcaagttaaataacccagctatcctttcgttaagatcactactttccttatagaaatctgtagtgtttaaaccagtcatgtcatataaaggaatcatagtctctgacatagagtaaggtaaaccattcagagcgtcatctaaacgaacagtgttatcctcttcagcaaaccttaagttatctctactgtagatcttaccaccaacaaagatactaaagactctatcgtctcttatgtcgtaaaggttatttctgcctaacacaccgttgttaacgaagccattgatttcatgttgattaagttcatcaatgctactaacaactcctctagctcgtatgtgtactttttgattctctttagtgtagtctatataagtcttattgactatgttaatattaggtaactctaagaagtagtctaggttatagttaagacgatatccgtttaagtaaacttctaatgtctcaggtacatagtcaagaggatggcgtttcaaacctaatcctctatcctctacataactaataggaaagaacatggtaccttgtgttaacggaacatctacatcccacaacaccgggttatcctggtaaactactttaaccttttctatatcagatagattaagagtagctagttgtccgtttataactactttgctagcatcgttagttatatctacccaaggagactgtctagtgaagtcctggaagctagccatcaataaacgatactcaaagttacgtagattaatcacttcacctttaacatacaacgcaccgtgactcgcaacttcagtaccacgtataaactctaaatgtcggatgttattgctactaggaatgtaagcgggaccttgtgtagtaaaacgaccagtcattcgtctattcttatcgtactcatagacagtagaatcgtttctatagattcttggaacttgaacatagttatcagtactacttattcgtataggagacttaccatattcaaaagaaataccgttgtaacctatagctgatctagataactcttcagttacttttgacatagatttaagtgatgctaattcaaagtagtcacttgcttctaatgtctcagcacgaaactcagtgatagtatagttagtattagttaaaacatccaactgtactgtcttaggtaatttatatagttcatgtaactttaaggaagtgtatttcaactctctacttaaaccactcttacgagtatatatagttatgtatttatcaccagagactccacctattttattagataaagtagttgcttgattattaacatactgagtgtataaactatagtctttatcagttacgtttctaacaacaaagtctttatgttgatagaagtatatacctgttgtgtgacctgttggaatcgaggtgatgtagatttcattatcatcttcatactgaattctgtttataacaggatctctatatagtaagtattttaacttggtatccttactagaagagaaagtacgtaatccgttaatggggtatctttctttagagatgatagattgatcatacagaacttcaactctagatggtgttggtaaatgtaacgtgacgttatcggtataataaccgtttacgtataccattacatcaccaccactttgcttatactctgctatcttagtttgtacagttactttattagcgttgttatttactatataagaacttaactgaatgcctttacgaacaggttgtgttaaatactcgttagttgtgaaataacgattactgtaaactctgaggaacttgaaactctccacgtcaaagtttcttgacatctctaaatctattttagttgcaaagatgatactgttctcatctatgaacatatagtagatgttagctctgggaaacataactccttcttggttatatagttgtaagatatagtctctgtcaaccatatctttacttacttgaacccaagagtctttgtaccagtctctgttctgtcttaagaggtttataaccgtagggttaaggtttcctataaggtatacatgaaacgtgttagtggagtctgggaggtgtttagaagcaccagaataaatagctacattacgtttagctggtcgcttaggtttagtaactctaattagattaaaagtatactgtctatcttgatgtggtgcacagtagatgttttctaaggcaaatctttgtatttcacgcacattaacctcctaccaatcattgttgttggtaccttgaattccgtctactacagtgttgatcaacttaacaaactcatcaccacgacctcttttattaactcgctcaataacaccagagataccagtgcgtttaaagctacggtcagttaaagaagtatagaccatagcacaccaagtaggtggatgagacaatgctaatagagctaactctttactactgctacccatccaagagttcgcaaacaaagaaaacagtaagttagagtctaatccctttaaacggatattatcagtgactatatagcaagcttcacaaaaatcatctagtgtcttcatgtcaccagcttcttggtaaacttcttcaattaacttaggaactaaaatctcttccttagaacgaatcaatagtttatcaaagtcatcgctagtaaaggtatcaatgaacagacttgagtagtatattaaagccaatactttaagtcgtaattgatcacccatacctaaaccaaacttacgagtgagtccgtctgagatccattcggcatatgccatatgagatagtttgagagagtaaatagaactttccttacctaagtaccattgagcacttaaaaggtaacgtctgtatgctaacccaaactcagactggtttctaatctcaaaagaatctttactaggactcaacttaacatacggacgcatatccatggctaatatattggagtcgggaaccgcatacatatggttgaatgctggaatgtctttttcactatcagttaacccaacaaggaacacaggtgagtaatcactactagttaaattagataccatattcttatctaacaaacccttttgtccaatcttactacgtatatacatatagtcagtaattacataatgttttagtggtctgttaattcggttcacgtccactaaatctagtggttttgtatcgtatggatttcttaggatcatggttaattccttcccaaatttatgtggtagttcaaaaaatgcccttctgctctcaaaggagtttaaaatatgtctgatatcatcaacgcagcaccgatggttattgatcaaggcactcaagatttaagtactcgagttgttcctactcaaccattactgttcccccaacatttaccaaaagtatatctttttgcagagaagggtcctattggtcctaactatgtagattttgataacaccgctatcactaaagtttacggtgataacacttttgatgttaacggtaaataccacacacaccaaactccatttgctcagaagttcgctgctaacgctaacaactgtgtaatccaccgtttggttccacaagacgctaatgaccgtgctaacgttgcactgtacctagacatcttagaaacacaagtacctgtctatgaaaagaactctgatggttctttgaaagtagatgatttcaacaacccaatcgtagctgaagattcaggtggtgagccaatcaccatcaatggttataaagtagcatgggtaactgataaaactgaagcactggttggtgagtatactccaggtcagttgactgttcgtcctggtgtacaggtagacggttctactcaatcacaacagtaccctatcttcgaattcgcagctcaagacgctggtgaaggtggtaacttattaggtgttaaactgtatgctgctaacggtgcagacgtaatgcctttcccttcagctcagttgaatgaaggtaaacaatacccatactacttcggtatgagtcgtgtagtagattcgatttctggtaaagtcaacgctgtgatgaatagctttggttcacagatgtctaagttatctttcaagtctgacggtattgatccagctagcggtgctaacattagtttagctaaagtagttaaggatcagtatatcgacctaccttctaacttaagcactgatttaggtactgcttttgtttatgatggtaacttgaatactgttcttggtttgatgtataaccttgaaaagaacattactgatgaacatcgtgataacgttattcgtaacgacgaagataacttgtttgctctgaacattcttaacttcactagcagtaacggttcaccttaccaggctcttaagttagttgatgtttcaggtagcgttcgtttaggtaaaaacactaacgtattcttgagcggtggtagtgatggtactatcaacgaagctgtactagattcattagtagctgctgacctacagaactacgctgacggtctacatgaataccaggacttagttggtcacccagaatctatcatttacgatagtggttttggtttgagcactaagaaagtattccctaagttcattgcactacgtaaagatacctttgttgttctgtctagctacgctcatgacatcggtatgagtatgttagcggaccaaacgtctgttgccattgctcttaagacaatgatggaactgtatcctgagtcagctacattcggtactccggttatgcgtggtgttgttatggctgcttctggttatatcaacggttcactgtacaccaaacgtgttcctactacctatgagttagctcacaaagcttctcgttacatgggtgctaagaacggtgcttggactaacggtctgcgttttgataaggctccattgtctgttattactcagttgcgtgatcttgatatcacttgggttccaacgtctactcgtaataagttgtgggctgttggtcttaacttcccgctgaactaccaggctcgtcgtcagttcttccctgcaattcaaactgtttatcaggatgacacttcagtgttgaacagcttcttcaccacagttgctatctcttaccttaacaagattgctcacgcagcttggagagagttcacaggtgatgtaagtctgacttcagctcagttagaaaacgaagttaataactttgtatctggtttggttaaagataagtttgatggtctgtttgttattgttcctgattgtacagtaactgagttggatgagttgcgtggtttctcttggactttaccaattaagatctactctaacaacatgaaaactgtaatgagtacttcggttcaggctctacgtcagtccgatttagattcttaatctttctaaccagataaaaaacttgagaggaataaacaatgagtcgtattactaacgctttgttgtccaatggttacaacaaaacaaacaatgcaatgcttgacctgcaacatggtggtcaaggtggttggatgcctaaccacactgagtggatcagtaaccaagcttacgtatcacgtcctttggtatgtgttatgttggaagctcctcagatgtttaagcgtatgcctaaccctgagaagtggattgctagcttgaaagctttatttgaactacatccacgtagtatcgaaggtttggctgctggtcttaaagttgatactgatgagcacgctgtaggtggtgctggtgaaatgcaaactgagattgttaacgttactcgtgaacgttcaactcctcgttttgcttacactgagaagtatggtcgtcctattcagaacttgttagacttctggattcgctacggtatgatggatccagagactaagtttgctcttctgggtgctactagcggacaaggtatgactgatcacctggctgattggtatagtgctacatgtctgttctttgaaccagaccacaaccacaagcgtgttgataaagcttggattgttactaacatgttcccaactagcaacggtgatttagttgctaagcgtgacttgacgagttcacaagaaattctgcagttggatattgaatttcctggtattgctcaatcaggttttggtgttaaagcttttgctcagggtatccttgacaagatcaatatcactaacgctgatcctaacatgaagccttctttcattactgacattcacgctgacgttaaagcagctgacaaagttggttataagagctggactgaagaagtaggtaaaacagctatggataagatgtcttaatcctaactgtgtgaagaatccaccacctagggttcgccttaggtggtgggtatcttttggatatttagctaacagttaaaggcggtgtgttgtggagatcatcaagtttacagaagcagtatttgcttctaagggaatgaagggtattattacccctgatagtgacggttattatacagtagttgttggtgctctcaacacttataacagtgctggtgagtactataccgcacaagacgctacagagctgtttaacagctcttctatctttatgcgacgtgttaagaatggtgctctttacgctgaagtaggacaccctaagaagcttcctgggatgggtaacgacgagttctataatcgtgttctctctattgaagagactaacgtatgcggacactttagtgagatcagtttagatcctagttttggtgctaaacatcctgaattaaacaatcctgatttgatcgctatcattgctaaagttaaaccagctggtcctaaagctgaagcattacgtattgcgttagagaatcctaaacagaactcagcttttagtattcgtgctttgactgagaacaagtttagaaatggtcgagtagaaaggcgcttaactactatcgttacttttgactttgtattagaacctggtatcagtgtggccactaaagctatgtctcctggtttagaagatcataaagaacgtcagagttattctgttaaagaggtaagtgatactacagttgatcgtgctgtcttagcaagtgtgcttaaacgtaacttggagtttgttggtatggagtctaacagtcgtgctttgtatgatgacgtactgaaaggtttagctcctcgtcaagttaagagtaagttgagtgattggtgattaacattactaggagaggaggacttcggttcttctctcttggttattgaagtttttatgattacatatataacacttagagactatacagaatacatctgttaggacattggagtaataattatgaaagaagaagtatttaataagttagttttagaacacattactaaccttggtggattctacaacacaatggaccgagctcacgggttagatcactttaaacgagtgtttgattgtggagttgttttaaacaattcattgtcctacgaagatcagttcagtgaaagaatgatctttgcagttgcttacacccatgacatattcactgctgtttgtcgtgaacaccaccacactttcgctgggcagtttgtgcgtaacaacgctaaactcttctttgggtacttgtgttcaggtgagatagaatttgtagctttagcttgtgaacaacacagggctagttacactggtaagtttactaatcctttctgtgaacttatgaactcagcagaccgagaactacctacgtcagctaaagatatcttagccagagctattctttaccgtgaggaccattatcctcatgaaactaaagaacaagtcttagctgagtcagtccaacacttgaaagacaaattcggtcacggaggttacgcacgctaccctgatctttacgaacgtacctttaagaaggagttagattttattagagacgagatagctcatatgtaatacagagagaggactaaccatcctctctttcttttttcctttaaccttacatttattgaacctaaccaaaggagttaattctcgtgaaaattaaaactaagtttggacaagtcccttctaaacagaagacagttgctgaagtaatggaacagcgtttagaagaagagaaagctaaacgtaaaactgaagaaaagaaagactaactaatgcttaagatatcttcagttcaagatgacttatcttcgttgttagaatctgaacacatcgttgtttgtttcaatgacctatataagtcggttggacttaacccaccaactaaaaccctacacatggacttattcttacaccacgcttattgtccaactgtagagatagatacagatatagaagctgctaatcctgatttagataaatgggatattgcagttagagtagatatgatagaagttatattatctaaagtctacactgataaaagattagattcaatattacaagtgtacttctgaacaatacataggtacatatataatacatagatgtctatacctatcagcttaggttggtaggtatagttacttccatataggagaaacaatatgctttacattgtacgtgggttatcagataacgcaaatagcgatattgcagtgcagatgggtatagatggtttagttgattcggtaatcggaactagcgatatgttataccaagctgcttgtgttcgtgaagctgaactggaattagcaaaaggattacgagtagctgtgtcttgtcctctttggtataaagaagcggttgaactctttactaagttaactgataagtttgaagtaatccgtgtagaacctaacaccgatggtttagtagacaaagctacgttgggttatcttgaagatcgttttgaagattatccaggtgaaactattattaacgctattaataactaagaggataagttatgtggttgaaactaattactgcagtagaacaattacctaaaggagttgtacctgttaagttacctgtcgtgtatgacactatgacagagttgtattatgaattaggagaaggtaaaccgttcactaaagacgagtcttacatagaacctattccgctagttaacttagatcgagataatcgaatcttaaagttcatgtctgtcttaactgggattaaaactggcactccaagacagcaaagtaagatacatagttttcttcttactaaacactccaagacaacaaacaacaatgactatctaactagagactgtatgtcgcctcgttgtatctacaatctaggttctctctggagacgattaactgacatgtatcactgtggtcaaaagttcttagtagaagaattagatgtcagagatcgtgacacggtaaaaagaacatcgttgattggttacactaatagaaacctaacaggttacatctgtgttgcgtttggtatcatgggtggtttgaaaggtattgtagaagtgactaaacacgaaggtgacaaggtagaatttaagatgttaggtattggcaatagaagtagtaatattaaaggatatctagcacccattcaccatgtatctaaacaagaagtttggaagacaacggagtaaactcatgagactatttcagaagaccaaagacggtggtaaagattctacggtagacgctttctttctaattgaattgaaaggtttatttagtgtagctttgttacgctttaataaaggtagtagagttaactatcacagtcacgcgttcaatgcttttacttggttcctatctggagacatggtagaacatcgtttaagtaataactcagttactgtgaaggaaactaaatacaagcgtagtgtattccctaaggtcacaagtaaagataacttacacaaagttatagctaacgagacttcatggtgttttactatccgtggtccgtggtcagatcaatgggtagagtttaatcaagaaagacttgagaagattacattaactcatggtcgtaaagtagtgaaagttgaagaattaaaagatattattaaagtagtttaattagagagaacaattatgttggataaattacagatccatattaaagagttacaaaacgaccctgaaggaaactctagagaaattaacaccaaatacggagtcattactgttaagtttcatcgcgacactaggttaggtgagataatagcaaaccccgtaacagttactagtttgtttttaaagaacgttattagtgacaccccgtccgcttcacttgtaatagaagatctacttaaaatcacctgcctacttaaagatgttcgcgtggaaatgaataattttcaggatgccaagatacacttgtattctgaagtattggacttagcttctattgatgttatagctgtaaccattgatgtcagatctaaagtcaaattaacccgagtagaaaagatctatcaaacagaacaactttacaaacaaggttacactcagatggagattgctaatcgtttaaacgttagtcaaaaaactatcagtaattacattaagaaaattggagaaacaaatgtcaaaagctaaagacgtagttctatttcacgcacagtgcaccgacggtatgtttgcggcatacgcacactacctctgtaaaggcagtagagctaacacagtgtatatccctgtaggttacacaggtcttcgggataagtctcctagtgaagttgtagagtctctactatgtaatattgaagatattgaaaaacgtgatgtttatatcttagacttctcgtttgatccagtagtcttagagttgatgggtaagaaagttaacagtgttcttattttagatcaccacctatctgctagtaaggtctactcagaccactacaaagaagaagctaaaaatggtattctacaactgaacatcactgataacactcgtgtcttcttcgacatgaatcgcagtggtgctatgattgcgttcaattacttcttccctgatatttctactgagaacgtacctaccccgttcaagtgggtgcaggatcgtgatttgtggaagtttgaatacggtcagactaaagagtttgcggctggtattcgtcaccatactgctatgttagactttaagaaagtgggagatcttcaagtactacataacctacttgaacatgagctttctaaagtaatgtctacaggtactttacttgttactgaacgagaagatcgtgttaaccgtgagaagaaaaacggttataagcaagtgtggattaacggtcagagagtagcattcatcaacgcacctttagacattgcatctgagttaggtaactctattgtaatggacggtcgtgttggtattgctgttatctatgtagtagcacctggacgttctagtgatcaacgcgaagatcttcctacagtgttatgttctattcgctcacatgacgacgtagatagtttgttctttgctaaacactttggtggtggtggtcacgctcaatctaacggttgcgctatctccttagaacaactcaaccgcttcttaactgtgaagggtaaccacactctagttaagtaatttaaacactcccagagggattgtagttcctctgggttagggtacagaaatgcacatcgagaataaagaaataacttataaattcactatcagagggaataagtttaagattgttatatggaaaggtttcattagagtttacaaggaaaggagtgaaatcactaccttaatacctagtcaactaaagaacatactaaacgctttagagtataaagtatttggtgtatcaaattacactgaattcggatatgaaatactatcccctccagaacgttttaatcttgctaccaaggaataacctaatgactaaacatattataagtcacaccaagttaacaaatgaatctcataacttagttatctacgaaggagacactaaagacatttacaaagtacgcgtggatggtgaaaagataaaaatccatcatctattacaagacgaccaggggttgataaaatacccagtgtctctcctgtctgagatcgggttggatattacttctttattaaactttgaagcttggagtagtgacgatgaccatgttagtagttaacactaaatcagataaccacggtaataaaaaggttctcgtacacgactcagctacaggtcatttatatgaagtagaatatctgtctacaggaggagcttcggttaaggtattaaatacaactgatactggtgtggtaaacaagaaagcagttgacttatccacagaagaagctaagaaacttttctcttctgttaagggtatgaacgtgactaacactattcttaaagaacacttgatagtctacactctagtggaatctaaaccacgttccagtggtagtggggtgttagcgtaatggctatgtttatcttgaaccaccaacaatcagctggagaacagatctttactgtgctagatggttctgctaatatcctttactatgtatcactggaaaagaacttgatgggtatttcagttcttaaagaggttgtcggtagattaactagaatagtagttgacataccagacagtaaagctaaagaaatagctgacttagttactccggacggagtagatgaaattagacctattaaagaaatccgttatgtattaaaactagctaaggggtaaagtccgatgactactgaaagagatttacacactatcaacgctaaagaatctgagggaactgaaaagtatccttggtttatctttgactttaactctaaggtattatataccgtgtccgttattaaaggttattttagagttggtcgatactactccgataacggagaagctaagattgagtacactgatattagtgacgaagagatagatgctttgttctatcacgtttaccctaaaccaaccgaatagtaatattaactctacactaaacccataaacttaaaagaagagagacaacatatgtcatttcacctgatcaaaaaagaagacaaagacaacaacctaactgtagctaccgtgtttgacggtacaatgggtatgttgtatcgagtaactaagaacgtagataagttctatgttgaacatttatctgagtctagtaacggtgaaactctattagctacagaagctaagttagacgatagcactgcgttagagattcttaaggtagctattcctagtactgtacttggtatcaagaaactagtaactactcactatgaattaagtaaagaagaagttaaagataatacttgtgtcattactcagtttaaagtagaaggtagcgcagctcactaataaagacttatccaccaagaagcctaataagcttcttggtggtagtgttctttttttctttagatgtgactgaaattcttacagttacatatatattacctagagagatacagtgtaattctatactgtataattattgttggaggtctctatgtgtaatttatcagctttagttaatggagatctcactgatcgccagatactatcagttaagaaactagatgaagttcgtaaagaaggactacctttagtagaacgcattccgtacataatggaatgtatgttcgaaatggaactctcttttgagtacgttgaaagttttattgttaagttgattaacagagccaaagaaagacacttaaaagaagtgtcttctaatttaacaaacctagacactgagttgatggagttatctccacgggtgtttctaggttaagaaggaacacataaccgacgtttaataaagtatagtttaaagaaaccactacccggctaacgctaggtagtggtttcttttttctttctttacaactcaattacttctacatctctaaagttagctagagtctggtctacatgtgtgatcaagaagatctgactgtagaaactacctgacatcaaactaaagattaagttaaacaacttagctctatggttagtgtctagtgttaaaccaaactcatctaagaacaaacaactcccttctaaccctaacaacctgtacatcactaacttaaaactaagattgatgatctccttcataccgttagatactaagttgatatcgtctatagtcatcttgtcttctacctctaccttaaacttatagttcaaagcttcactctctatatctagaggacgcagtatcatcttgtaatcccagataccacggatagtgttattgatgttgttaattatgttgttaaggaaactactcactgacttagcaataataccgttcttaggtgatagttcatctagagtgatgttaagtactttagagttctcttggtagtcttctattaatttcttagcttgttctacggagtaagagatagtcttgtggtgtgctaactcattctcagtctctactatgattacctttgactttgttaagtcagtgtctatagtcgctatgatcgcgtctacaacgtttgagaggttactggtagtgacattagtcctagacgtttctatctcagtgtggagcttatcaaggtacgtgtggagagtgttagctctttgtatgtgagaaagattagctagtaagtctttcttcttagcttgtagctcaaacgctaagctacttagtgtattaacttcttcttctatattagagagagatgtattacgtaatgtatttagagtttctagaccttcgtgtatctctgatagtctagtgtctatttctgttaatcttctaaggtacttaacatctaaagcagcttgtgctatgactgtcattatcttaggtggatcttcgtagacgtaacctaatgaatttactctattccaaacttcttgaagagattctctagtaacagaaacaagacgactaaactgtctgtgttggttgaagtactcttgttgttgctcttgaatagcttctatctctttaactttagtctgtgctttatgtttgtcccctagaactgtctgtagctttgttctagcatcttttaagagagtagggatatccttgggtgaccaagtgtattcacagctaggacaggtcgtggtgtcgttagaggaggtgtagtcttctatagctttctctaaacgaatctcttcttgaatagctttgttaagaagttcgttgtagtgtcttaggttgttatcagccgcgtaagctgaatctctagaatacttaagtatgttgtctaccgttgggttaggttgcatctcacttagtatctcaggtagagatgtttctaactgatatatctcattagagtagagagttacctttgacttgtctttaagtagggtaagagaagactctagattagattgctccatagctagatgtgcttcttcttgtagtagagaatctacgtctactgaagctaacaaggataaagctttacgttccttatctttttcctctagtgtagtgtagagttgattgagttgaaagtctactacggatagttctgagttatacttagtagtgtacttaggtatatcaccacgagggaaagatgttcttagaagatagtaccttttgttaaggtcttttaacttcatagttaagtctttgtgtgtgtggtagagatctaactgagatccatctgacttatgtttgtaaagggttgttctcatctctagaagtaagtcactgtaatctttagttctttgtagtgtagcgttaagagtttcaagacgagtagtgtctgaaagtttagcttcttcacgttgtagtatagacgcttgagactttaatagtaactcattgttctttagctcttctcgcagcttctcgtacgcttctaagacactatctatgttaaggtgagtgatagtattgaataacttcttacgtgcaaggagcgacatactagtgaagttctctttaccaacaaagatgtcatgtactacttgagagatattaaagtgtttaagaactaatgctctttgtgtagatacaatagctgcagtgtttaattcttctccattcataacgaatctaaacttagctgacttctctgtgaagtctgagataagaatatacttgtcatggtctttctctatatgtatctctttgtatccaccttgattgaagtcgttcttatctgaaggtagtggagtaagttcattgaagagagaagacttaccagatccattaggacctgagatcatggttaatttgtttgttgggttgaaggtatgttcaaaggtgttatcgtctctgagtggcatacgtttaaagttaactagttgtatgtaagtgatgaacatgtctatagtccttatctgatcattggatgtttcctttagttctttttgaatagaagaatagggaagttatttagctacatatataatagatagaagttaatagtgagtaataaaaaactcacagtaatatttgttggtcttctctttcttatctaaggaagggaaacctaaggaagggaaggtttaaagacatagatatagagagagagtatagaggaatagtaagtgtagagagatatactctctatagtcattaacctagtgagtgttacttgttatgagtttaagtgaacgtttaaaggagttaagagagaataagaaagtatcactacaaacagtagctgatagtgttggtgtaactaaaccccatatatgggagttagagaaaggtacatctaagaatcctagcattagtttaatagttagcttatgtgtttactataatgttactgtagactatctacttggagttagtgttgatagttctaatcctttaacgttgtacttcgaaaggacactaaagaagtctggtattcgtgagttaagtgttgatgatatggatgttttgacactggctattgatatggcgatagctctcataaaacaacggaaagaaagtaataaggactaggttatgtcagtacgcattaattttgatctagcagtagaaggtaagactgagtggtcttacaataaggtattaccgacagagaatagtcttgttatacagagttatgctgagcgggttatcaaggatatagtggatggtattcgtgtaagagtatttcgtttgaacgaattaggttgggattcttcttacactacggagtatgagagttctttacgtaacttgttaagtggagtgtttagagttagttgtatagcccaggatactattcacaaacaatatccttgtaaagacagcattatgttagctacaattattactccttgtgttactggtgtaaagagtttagtataaactattgagaaggggtggcttaggctgctccttcttattattattttattgtgaatgagatgattatttaaggggaagattatgagtttagttaagaacgaagacggtagttatactgttaatgctactaagttagatgttaagaatgaaagtaatcagatttggaagagtcagcttgtaaaggctattttggataatgctgatagttcatttagaactaagttgaaagaaggtggtgtgtattctaactggggatcacccacaccttctaaagacatgtctattgaggaaagttttgagttctatacacaaacaaatactgaagatacatgtgctatcgttgtagattgcaacttggaggaagataacgtagtacaagtacgtttccgtcctttcggtccaaagggacatctactacagtctttaatagagggaggaattaaaccaactttcggcatacgaagtattggtgaggttaattacgacgaaacacacacacagatcgtttcggttaaagagataattactttagatgtagttactaagggtcttaaggacctaacatcaaaacttttctttccggaacttcagacagtttacaatgaccctgatgtggtgttggttgacttagataacattgctgctaaatattccgttaaaggtgaagaattagaacgcatacctttagaagaagtcttaactaccacacgcgaaacagttgtgtctcccgataattttaaacatgtcagtggtgatatctacatagttagaactcaagcgggtttaaagaatgcacttaaacagtacgttaaccaacacaacactgaagaccttagagaagcacgatactatctagtaggttatcctaagtcgtatccttctgtagtttcattctctacagagtaccaaggatatcactatgtaaaggttaactgtgtgcatgttaataaattaacaaaagctattactgaatcggagaataaaatatgatcatgtcagataagtggttgattaagaatctacataaactaatgactggaggtagcagaggcgctgtacggtacgttgaccgtgagacaggtattcctttagctaacaactttcaaatgggtagagagcttcctggggacgctagacgagttgtttcgtatggtgttagtagttatggttacgatgttcgtttagataacaatgttaatcacatccgtatctttagtaacgtcaaggttacagagattaatcctaagaagatgagtgaagataacttctatcaaccgactgttttagtagatgaagatggtggtgagtacgtgttgattccacctcactcctatctacaagctcctacggttgagtactttgatatacctagagatatcatggtggttgtgttgggtaagagcacatatgctcgtagtggggttgtgtgtaacgttactcctattgaaccaggatttcaaggtaacgtagttattgagttagctaacgttactagctctcatgttcgttgttacttgaatgaaggagtagctcagtttctattcttccaagggaatgaaccttgtggtttaagctacgctgacaaaggtggtaagtatcaaggtcagacgggtatgactatggctaaggtatagttttggagatagttacaagtacatatatagtacatagactactgagctattcatttagcttagtagtaaactaacacactttaaagaaggtattacaatatgactactgtagaagaaaactccgagttaagtaaaatcttgcaagaaaacttaaaggaaagagaacagtttaagaaagaaggtaaacttcgatctaaagaagaactagattctttacagaaacaacaatttctaaacgttaataagaacttcggttcaatgggtaactttgtaaagaataaggaatagcgtatgtctgaatacaaagtaatcttcagtaatcctaatctattaatctatgttgatttaaacgaacaagatcaacgtagtctatatgttaaagaagctataactaatgtaggttttaattctagatttcctcacggactaactgtttatttgaatcactctcgtaacaagttaatcttccagttcacaggacccggtaagaaacgtactctttgtactttaaacatgtctacagttgaaggagctgcgtctgttcttgaaacatatcgtagattccttaagagagtatacgatagaactactcagttgtatgatcttagtttgtctcaaggttgtggtgctatcttatataaacggaaattaccatttgtgtatgatactactgtaggggataaggtacacttctacaatccctttactaagaagactgcttatttagctaagacagacgacccagctcttaaacgaaaacaacgtaaggtttccaaagagatcttactggagatgagaacatatagagtctcacacagagacgtgttaggttctatagtgtataaaggattacgtaaaaggtaaagtccgatgaagtcatatgtcgctgttaaggaacagagtagagtagatgtctttagcaatgataatttagatatttacttaactttagatgcaaaagaacaacgtaggttagtagttattagtccagacactggaaagggtttctctgttaggttccctaaagggttagttatctactacggtgtagttgattctaaacttaagttccaatacacaggacctaataagaaaagaactataaactctacggttatatataaagttgactcaccagacgttgttcttgatatgtataagaaccacttagagaaagtatttgatagaactactagactgtttgatctaaacatcactcagtcctacggttctttaatctacggtgttaacggtaatagagctttcattcatccaaggtctaaagagaacaaggtagactactatgatcctgttctcaaaaagagttcctacttgacaactaaagacaatccacatagggttgacatagagttgaagaaatccaaagagatgaaagataaactagctgggtatatagtaactcataaacaaattataagttctattaaaaggattcgataaatgagtatgagagtagttacacttactatcacagtagacaatctcggaacattaactgttcttagatatttaccagtgacgaaaggaggtaagatctttcttgcctctattaagtctatggatctcgctatgagaactgaagtacctaaatgtaagaaactaaagtcgttagataaaaatgacttaatggtatacattaaagactgtgtagctacaatgattaactacgacagttatatggaaaacattaacttagatcgtactcttaatgttagtgttaagtgtacttttactattaggaagttttagcatgaacgcggatttatttatacacgcaactatcactgataacgaaaaacgtgtgttgttctatagaagtttaccggtcttctatcaaagtggagataagacattaaacgaatctatagttagagaagttcttaataaacttaagtcagaacaccatatgtgggctgtgagtactggaatatattctagtccggaagcaggttttatcggtgacaaattcaaccagttcttagatttaattaaacctcacctttataaccctaccggtatagagtcttcagaactcattgagtctgatagatactttcgtatttgggttacaacttaatttgggagtggtaacatgaaacgttatgtagtttggaatcaagctaagactatggggttgtttacaactgataaagaattagctcttagagtttctagtaacgcttttactggatgttacggtaaagacggtagagtaatagacatagctacttcttttagtgctgagtggtgtaaagttaaagggcagtgcactatggaaaaggtagatcgtaaattcccttggccagttggagttgagcactttacattagaatttgatcaaggcgaacctgtctggttaacccttaaactacacggagacatttaaacgtgaatattgattacaatgtagagtttgaaatcatgaaagaaaaccactccatcttttcccgtaaggacttgatggaagcttgtgacttcacaggtaaacctaacgtcggttacttgaaagaacatttgaacgaaacatataaccagctagacaactccagtgtgagagatcactacaacttatggttggataaagaagtcttagatttctttgagcgcttctgtaatcaactacaggaatgtaaagctcctttaactagaatgtctagagtagagactactaagaacggagtcaagtttaaactatctatacaacaaacaggcacttagaatgtctattagaaaactaactatttttgctgtggtttggaaagacttaccttatgtacgcttttcatggacatctgcctctttcccgggtaaccctgatgaaagaagaagcagagttggttcattaaagaattcctaacgaagtaaacactattcctaaattgaagaagaaggtaaacaacatgacacactttgtattagagttagaagttatcctcacacaacaacccgtatttaagatgtcactacccgtacttgcgactacagatgactacgaacagaaacgtaactttcgtcgtgcgttagataactgtaaagacggttacgttgattggagtaattcccaagaagaatctaaaggtgggtttggggattttgcaacttttggtttaagaaagaatagactcgaataccttttaggtgagtttggtttagtggaagagttcattaactacgttgaaaatttaattgaagagaatataaatctaccaagtggtattacttatggtaagtttattggtccagatctattctaccaagttagtgtaaaggagatatagtagtggaagactattacagaattaatctagaagttaacaacaaagaaaacaaaaaactcttcgttgagtcctgtgaatttacacagaacacttctacactcactatagataatttatctggtttactggaatcactacgcttccttaaagataaatttaaactgtggatgaaagaagatactgatagtaactgtgacgagttcactatcgacaagtttcttgatccggttattaagacactatacttcgatggttgtaataaaccaaacgaattacatgtgatgcaaagggtaagtgttgatttatatgtacacatctacatagataaattaatcaaataggaaggtattagatatgttgtcacatatagtaacagttagtttaaaggataaaacaggtaacgttcttttcagttcaaggctagcaactgagaagtacgacccaagtagcagagacgttgtaagatacggagttcaccacacctttaatcttatcctcaaatcgtacgagcaatggttcgaacgagaattccagtccatttctattgaagaatacgttaaagactttagaactcttttagaggaacacgaccttaatccaaacggtagtgacgagcttaacgtttcaatagacggagacaagttcctacacttaagtgtcatcagtttaacacaccaataactttactcggagttctacttaacttcacaaagaatacagtggaactctttagagtatatctttaacttaacggatacatcccatgcttgatcttaaaacaatagtagacaactacactagagaagaaaacatagtccctgtagaagtcctccctttactattcgacgcacatagcgaagaagaacagttagttgaaattgagaaagaccacaaagcaatcaccaaaattagtaatcgggaagaacacttcctaatgaaagtggttaacgctaacccttggtgtgtgggtgagattttaaatcctagcgaatacgtggcactcgaagctatcagtgttaatccgttagctatagcggttattgatgaaccgtctttaagggtgtgtaaatatgccctcgggaaagatcctaaggttgcgatctatatacctggggagtattatgatcagttaggtttatcggagaaatgtcaacctaaacctttctttcataacttacctagttaaaagcataccgaactaactggagggtaattcctctggttagtttcttttttcttttcttatcaaattctctgaatagaatcaggagtagtaggatgttaaatttatcagaacaaacggtaggttatatagagactacctttaatgaagtaatgaaaccaatcatctacaacaccttctctatgttagagacctttggtattagtttctacgaggataagtatgtagacttactacaccgtgagttcagcattgactctagtgataagcaagatacttttacttctatgttaagagaagatgttttcgatatccttaaagaacacgcagtgttattagatctagaacaagaacctaatctaacagaacttaaccatatagctaaaggtttgttgatgttccaaacccaagaagactaccaacctttaacatacatcttaaacaacgagacttcagataaagagaagttcattgcagttatccatacactaactgacttctctatctatcgtctaatggagttagtagaaagtgttggtgttaacttgattccttcaatgactcagttcgctaaagatagtcaagaggaagaaacaccagaacagttcgataaagaatggttagttcacgtagctaagttctttaagttcattgacgaaactccatgtctaggtttagaactcttcactagtggttatgttaacctagaactctctgaggtgattgatcttcttccatatgagctagactctaagatcaaaccgaacatctccctaaacgcaccacaagctgccttagacgtactcagtgttcttctagtcactaaagataactacaccaaacctttagagaaactagatgaacatctttacactttcttttctgacttaacagaagtgagtagagtaaaaccaatcattgtaactatggtaactgacttcagtaactacctattagttcataaacaagtagaggcagtccaatgacagctaagttagattacttcaagttagctatacagaacttaaaggtactggagagtaaagactggtatctatatacaatagctattccaatccttaaagctatgaaacaaccagaagaagaattggctctattcactaaaccagatggtctctactatagcacttatgtaagtggtacttgggaagcggttaagatctcagattatcgcgaaggtgaacctctctttcagtttgaagataagatcaacgcagatcctagttggttacctactatctctaaaccaatagaaacaactataggacgtatgttagttaatgcttttgttctatacggttcctttggtgtgaaggttccttatcgtaatgaaataatggaagttaaaactttcaacgagatattgattagacaacttagagatgaagacaaagctaaaggagatgatattaaagtatcggagatggtgcagtgtttcgatagacttactttcatcagtagtttagcgactatcattaacgtagctgctactaagaaaactatatctgcaccggaaggactagagaagaagaagaaagaactactagctaaatatgaaggtcaattaaccgaccctgttaagttagctgagtttgaaggggagttggataagttcgatagagacttcttatctgacgatccagactctgataagatacttagtagtaaaacacgtacagctagacgtaagatgtatttagcctttggtaaaccttctggatttgacaataacgcaacagctattacctcatcactcatggatggtctagaagtaagtagacaaaacttaccacaatacatggatgacttacgattcggtagttattctcgtggtggttcaacagctaagtccggttatatatacaagattctacagagagctttgactagtctaaacgttgtaggtactccttgtaatacaactacaggtttagttagatatataacagataaagactatatgaacttaatggatcgttctgttaaagtgtctggtaaatggaagatactttcatcaccagaagaagctgaacatttcgttggtaaagacacagagatacgttcacctatgtattgtacctctccaggtggtacggtttgttatagttgtctgagtgagagttataaagacagtgaggctggtatcactaacttagctgcagtgttctcagatgcgttaatgagtttgtttcttaaagctatgcactcgacttctacgtatctaacaacagtcactatggatgatctctgtacatagatctacaaccctccacagcgcccttctagagaaatctagagggcgttgttagggttatgtttataagtatctagaaacgactcacagtgtatctgaaatctttatggttacatatataatacctagagagatacggtgtaattctatactgtgtcattattactgaagctattccttacatataggatagcaatcactgtcctggaggacaacactatgtttaatttacaagacatccttgacactataacaaacatcaatccaacaacaaaagtctttgatcgaccattcgaagacattatcaaagaagttagacacactaccgaagacgtagttgttagttcagcttctaatcaaaccgatccaaaggcttctacatattttaaagtaggaagtaaagagtatgttgctcgctatcgtggagcatacactcagatctctttagtggcataaagattaaccactacctagcgttagccgggtagtggtttctttttttttttctttcttagtactgtttaatgaagtcattgattctatctaacacgtctttcttacctaagttaaacacagggatgttattctcactagctatcttaatagccataccagtcccacctgtcttactagttacttcactagctttctcagctccgtctgaagtataacaaacaacaaactcaactggagtattcaagttatagccaaacacttgacctacgtttctagcgtgtaacttacgtacaccttgagatagtctatcccagacaggatgtaacttagaagcaaattccatatgtttaagagtaggtaagtgttgagaagaatgctcattaaaaccttcccacggtaaccagatctctttcttaccttttactttatcacatccaacttcgaatgctttatcagcaccgacagcagctcctgaacgtagtgtaagacctttctgtgctaagacctcacctatcctaaccattatgtctaagatgtcgtcaggagtctctcgtgaacctataccagcgtagtacttaatttctatatacttctgccagtctttaggaaaactacaattcttaccgcatcctttaaacaaaggagctatttgatctttagtgaatccagctaaaccagtacccactccagttacccagaacttcttatctggattactgttaacaaactgtttaaaggagctaacatatcctttaataacgtctaatggtaatgtttttatttcgttgtctttagttggtatagcataacactttccagttacacctaaaccaatacctatctctgcattaaatagatttctagcaactagagcagcacctttaccatgtatgcctgctaagttacttccaaatacccaatagtaatcactaccttctggtggtagatcaccatgattgtgataatgaaacataatagtttccttttaaacataaagaacactctaccctaattggtgtagagtgttctattagtatagttacacgctgtagaatgaacccagacggttaacttgtactggtttaagaccttcgactaacaactcgaagttaatttcagacatagcatctttacgtgtcttaggatcagcagtgttaagaatcaacataatcaaacgacgatactgattaaactctgaaccgctacctgaccaagcgtcagtgtgacggaagatccacttctcactgtaaacaccatcacggttcttattaacgaaacctaagagtgtaccccactcggtgttgaaatcagattgttcttcagtactcaaaacacgtttgatcagaaggaacaatgtcatgtgccattgagcggctgcttctttagtgattgacttcttagggtccattgcttcagcaaagttgtttaactcaaattctactttatgcattaagattgctccgcgatcttgtttagatggttgtggtttttctccagtaggaggtagttcatcttcagtaacaggactttctactacaggtgcaacttcttccacgtttgcagtaacttctaactctacaggaacttctgtttcgtcaacaacaacttcttctgtagtttcaaccggtggagtttcttctactacttcttcagaaggttgttcaacttctactacttcttcacctgggacaacttcttcagttgcttcagtggagttttcagtaggtaagctatttaacaactcttcagcttctgtttcgtcaacacctaaattggatttgtctaacatacggttcttctttttagccatgggataaaactcctttacaaattaaagactctagctaacatatcttcagcgccagctttccctaagttaataacagggaagtggtacttagatgctaagccaatcatgaaagatcctttaccagtatctttagtaatctcagctgatttactcacaccatctggactccaagttacaagacacttaacgatactgttattcttacctccaaacatcatacgtacgtttcgagctaacatagactttactacgtcgggtactttgtcccaagccgcaaagtttacactcgccatgtgtttgctagtttccatattgaagtagtgttttgtttcgatatcattgaaacctttccaaggagtatagacttcaatattcttacttggtagagtagcgatgcgatcgtgaaactctttatcgtcaccgtttactctcacaacaatgccgttatttattaaacgagtaataacgttaaataattgatcttttacctgtggaggatagtctctgtcaacatagacagccactggtagataaggatcttcaactacatcttctttcttttgaaaaccaccaccaccaccgttccaaggtttcttagcaccaccaccataactaggtttgtttgaattataaccattgttttgttgctgctgatattgttgttgtggagcttgctgttggtactgttgttgttgaggttgttgctgatactgctgttgtggagcttgttgttgctgatattgttgttgtggttgttgttgtgtgaggtcactcacgtccataccaccaaagtcttctaattcgtcgaacatgacgcacctctatatctttaagcttgggtatcactctatgttatctagaatttaaaaacacacgaccccaccgaagtgaagtcgtgtagttttatttatgcaccaattacagtaccaacaatgaagtactcagtgttaactttatctgacttgaagaagatacgctcaccaggagcaagtaacatagcttcaacaataacagtgtcgtgacttgggatagcaagcttaataaacttatcgccagcacttggagtggtagagttagtgatccaaccttcaataatacagtcattagcgtcagtgttaaacacagtcaatgaagcagcagtgtaagctgatgctggagtatcgttgttaaagatttgagtttggttaacgctaggaacagcaactgcaccaagacgaccagctttcagaactttagggttgttttcttcaacaccagccaaacgtacacttacatctggaccagatagaactttgatgtaaactttctgaccttcaccaacaaccaacttgttcaactcagcaaagttaacagaaccaatcagttcaatgtcatcaatgaaatagtcaacagtagataaagaagaaggatcactactttcggttacagcaatagcgatcaagctatctagatcttcgttatctttaaagaaagaaacgtctagaatagcatgggttttacctgctggacaagagtagacttgggtagctacttgttcagttaacaggaacttagaaattacagggttaaggatactcatgtgtggttctccaaacttaaaggaatgacttcaaaatccactcgatttaaaacaccgaggtagggtatttaagaaacttgttatcaatgttgaccgagtacactacacgttcgtctgtatgtagcttaacataggaagttacaaagttagattcatcttcaactagaatcaattctaccttacgaatatctgcttccatagatttaagggacagataactaggtagatcaaaacctaatgacaaacgaaacacttgcttaagattcttcttaataaagtttttatcaaactctaggaatttatccatgttagtgaacgcaagtttaccatcttttattatacgatcagttatgtctattggattaagtaaagatccttgtttaagtgtttcattaacatctaagattctagtgaatagtctattactactcattatgaaagggagattattattatcactataaacaaaaggagttgtaccaccaaccataccgaagtatgtctcataaccatcatgtttagttaccatcatatcttctatattgatgtacttagatagacgtaatatagtcttgtcagtcaataaaggaagtcgtatactcaccatacgagaataaccagctaccatagaacggtatctagctttgatacgattgattacttccggaacataacctacgtttacactaaacaaagaggtgatgtctcgcttacctatccctgatatatcattagcactagtaaggaaacagtagttaacatcgtcctgttctttacttccgaagaataagtgattgtaattatacacgatatccttatcgttaaaagaatctttgtaggttttatagtcactgacttgatctagaataacacgaacttcaggtgagttgtcgttaacacattccttagcagcgttagatcctataccagcaaaaagatccactaagttattaccgaacgaatcactatgtcctttcacccactccaattctacactgatttccttttcagttaacgtagttcttaatgtatcaatgtcctgccaaatctctaagtgagatacagtttcaccgttagaacgacgccaattattctttttccaattagaaatatattcgttgaaggaggagacgatgtacttactatccgtctttataaggactctagttagtccttcaatctctaacgcttttctcattacagtctgtactgctaacaactcagtttcgttgttggttaccttagaatgtttgactgctaaaatagcttcaaacacttcaagtacttcaatgttctccttttcgttattggttgccattcccttagtggtgaagattacgttagccttaataggatatctaaagttctttgccttctccaattcaacacaagtaaatccaaagataccacacccaccaaaaccttggttgggtaaacaagaaccatcagtataaactataagttgtttagacacattacttaccttcaaaaagtttatcagtatcagcagtgtttaacatgtgatgtatactagttaaagtggaatagtgttccttgtagaactcatccaatgcttctactattggtttaagagaacgaacgtgtttaggactagtaatacaaataggataggtcttcttagacagtaactcataaatgtaaactataccaaacaaagactcaggatcaatagtatcactcgtgttgaaaacatacttctctaactgttgtttgtatttctctttgaacttaccacctgtcatagttaacctggatggttcaaacacagtaccacagatagcgtaatgtaacttacctttacctttaactgtagtaaagaaaggtttctgtttatctggtcgatctgagaaagatacattgtcattaaagatactagcgatatcagcttgtaacgaatctaccacttcttgacctgcctcattaaactcttctggatctatagtgtatgatcctggttcatctataagttgttctggttctttaactaatgaatcgtttttagtgtataggtttttagtagacatattaatattcctagttgggtagatttcattgcattaagatcaatataaaaaagacatcaccggagagatatataactacatatatagtacttatgttagcacagtaaattcactgtactgtaccctttaactcactcaagctacacaaggatttaaaacgtgatcagaactaaagactgtctcatcaatctaagtaatctaaaaagtcagatagacaacgattactttaaataccgcgatatgttctacagatgtttgattgttaacttaggtctttacaacttaactaaagaggaaattcgtagcaccaccatcattgaagattcacactaccatcaaactttctttacaatgttagaaggtagtccttcaatagaacacctactgcgtgatgtagagtcaagcgaatacactatgttgttagtggatatgaacttatacttagatggttttctagaaaagaaccacaaccacaacacaatgaacatttacagtttgtctatagaagacaacttccacgtccggatatctaacaaacagatatctagaggacaaccaatctaccggagataagtatgttaggtaaatctctaacaatccaattgaaacatctctccataaactccctagataagggtaagtttacgttaaacatattacacactatcgtatgtgaagctattagcgtcactgtagattcacgcactgttagtaatatgaatgtctcatgtaacttcgaacgtaacctaggtcaagtagatctataccctcaactagattggctttacgaagcatctgagggcgagttactaacactcaaacattcgttccaaaactttgtaattagtactatggaacactttaattattctaaacttaagagtacacacactctaagttttaccaccgccgttcttggtaataacctagccgtgataagttacggtattattggagatagttttaatgttgaatcatgttagaccattcttacttaatcgtcaaaacaacttagctctacaaaaggaattaagtcttgactatgctaagatagattacatggccacggttagcgaattaatgtacacgtacaatgctcctgtcgagattcaaatagaattaggacagcggttatttcgactaatcaacttggtaatgatacacaacttgtttatctacatcgcggagaaccgtattcaagattatgttgtacatcttgagaaaggaactttgggatcagaattgtatgtcagttactattacttgaatcctatagctgagttactctttggtaatcatagcgaacatcaggacgataacttagactatttagtacaggtaataactaattacttaaatagaactatatccaaagaccatgagcgatactctttagttctacaccaagtatttgaagaactactagagacgtttcaaggttatccattagggtcgtttaagttagaaatgatgggggatagttctcctgttatatttctagtagaccccacagagggagcttcatgtgctcaagctaattcgtttctctgatcaagacttttctgatttattagatcacataccagatgtgagtaatacatctaagaatctttttgatgacatcattaactcaaacgactgtacttatgtggacttcatatatagtactttaatcaaccataaccgattgtataaagaaccagagtttccgattcgtataccaaggatgttcatagagtctaaaaccttaatggttgacgttatggaattaatgatttctgggtacttaaacaccgactgtcctctatcggataagtatagtagtttcttttatgatgacatgaattccgtcatagatgatgtacttggtgtagtcataggtcctagtaacgatcctgttgtagactacgaacataaaatcagattagagtacctaatggaggtaatagagatcgttagtgttatagacgattacatagaaggtattcttaagggtgcgttaatcgggtttggggagatctcctctatcatggtaactatagctcatgatagcgaatacctatacctgatactatctgatgaatttagacacgagttctctacgatatattaaaggggtaacatgtgcggatcacaactggaacaaacacaccggagggggtattagtacgaatcaaagataaactatgtttaactattggtttagacgtatctcgtataaaactacttgttgaccgttacgttatcaaaactgtaagcttcgatggaagtaaatcacacttcacaaaagttaatatgtttaacgatctaactagagaccggatgactataaaagtcttcttcaagtttcttagagtgatcttagttaagcgagttatactaagtgttagtgttactactatagatgatgacgactatacggttatagatgagttatctttatcacagttagaggaggctgctagtgataacggtaaaggaactaacaccccagaaggagtgttagttcgaattaaggataagctaagtacaataatggaattggatatagatagagttaagttactcgtagatagattcgtcactcaaagtttaaacgtaacgggtagtaaagctcattttactaagacaaatacctttaacgatctaactagaaagaaaatgacgattaaagtcttcttcaagtttcttagaattatactggtgaagaaggtaactatatccattacagtaacaactgtggatgataaagagtttacagtttcagagactatgactatatctcaagcacgagtgtaataagacaaaaggaaccactaccaacaaagggtagtggttctattgttttacttcttctaatataaggataatatctttagctagtttttctttttgtctttctgtaaaataagtaggacaatgttgatttacgttgtcatagatagtattgattttgtataagagaaaaatagatagaacaaaaccagaggtaagaatagtaactactatgaccttaagaggattgaactttttacttgttattttatactcgccatcagtgaagatagttctaagtaaaaatgtctctaatagttttaaataaaccaatatacacctccttggtcattttttgatttgtgcttcttttttatatgtgaggacggtaccgtgataaaactaaaagggtttgtgacgagggatgactttgtagtcccctcctctaaagtaacatctccaatatatgaattatcctctaaggggatgacttacgctaaggttcgtggtgatcattactataccgtagatcctcgttacagtttaaaggtgtttaagttagaaggtggagatttcattactaaacctcaagctgacttagtgatgaaagtagttacagcattcactacttttttacctaccatcatcaacatcaacaaacaaaacactatcttgttgttcacatctaactacaacgctttgaacccaagtacacctgtatctggattcacttacaataatatcgtagaacataacttaatacaagtacctgattacatttcttttgttactggtgatatatcggttaacatctggttaagtagtggtttgtttgagtcgttctaccctgactatgatatcgacgtagttctaccgtttgagaactttgttcataaggtaaataaccccggtgagttcattggtcaactaaatgactttaacctcattaagttcaatgatcgtattgactttgctaagtctcaagcaccttgtacctctacacgtattcttaacataccttataagttaggtaacactgacactttgaaagattgttactttgcgtttaacgtgtatggtgctcaaggtaactatgaacacatccttaaattagaactgtatcgttatttaactgaagaattgagcatcgaaggtagtgttgtagaaacattatttcctactctactaaacgtgaatgagttcttctttgtacctcgatgggataatatagctatacctggatctactggtatctctagtattaactcacaggtagttcgttcttacagtgctgactttgatatcactaagtttgttaaaggttatggtgatcacgtattccttaagaacaacacatacactgttccttttgactataacaacttgaacatccaagtagtaaacggaatgtatactgactttggtattcgtgactttaaaacttattatagtgacttcataagtgtacctacatcacatccggatttctctagaatgaaacagagaactcagcgattagttaccttgttggaaagtatgttagatgtagctaccagtagtgattcaactgaactgtttaataagatacaacaaaacagtagctacaacttcaacgtgattgttcgcagtggtgttacttacttatcttacctctttgaagatcaccagttgtatatcattcctcgttatgaattcttagctaatcagtaggaggttaaatgcctagcgtaagtatacacacacctaacattggtttagaaggttattttactttcaaagaacctattaacttctatgttcgtaataagtttaatctagatgagaaatcagttaagcttaaaatagttagtttgatatccatgggtgatatcattattaacgatatgcgagatccttacactgatctatacgaacctgctggtataagtgaaagtgaatacaagaaagatttgatagatagagtgcctttagttaccttagcgtttcttaatgatacttgtaacaatcagttcttacgagtgccacttaactatatagacagtataagtgacataagtagtatagattatcacagtaaggttattctcattgacttaaataagttacctgttaatcttaagttgagtcctttctttaatgaccttagtgatttcattgaaacacgtgtaggtattacacctactataaaggaagttagtttaggacgtgtagagtttgtagatgacttagaacatactacaagagaaactatccgtagtaatatggtatcagtacacaagactacggagattcaactagaagaaataacaactcgttacaatgagttactccatcgtttagacgaaatgggtatcatgttaactacgcaataaactacatacacctacctgtaaaagggtgggtgtatgtttaccccctatatatcctgtggttttagaataccacctgttttggtggactcaattaaattggaggctacatgtctagctacgacgaagaaggtatacggttattagataagacagtagccgtcagagaaagaatgattgaccacttattaaagtcggaagagctacccactaaagcacgagatgtagagaaatttgttactctactagactctacagataagagtatctttactcgcgctaagattaagttagaagaaagtaaccagaagactagtgaagaatctaaagagttactacgtgatcttttacttagtttacatcaaacacctaaagaaaaagacattactccaactactggagttatacctcaatttgtttcttcctctatggttgttactgatgctgaaattatgttagaagaagatgaaccagacatcgaacagtacttaagtaattaagacacatcaccagagagccgtcaagctctctggtgagtgtttgtttatatctttaacttactattaagtaaagcgatagaaccgctgtactgaggtcgtacttcccttgaggctatgtaaatagctttctctggagttagagtagtagagtttatttcttctgacatcaatttgtagaactctatagggtctatcttagtaggtacgtttacttccgtagaagttattcgagtcttcttaagaacgtttatgggcaaggacgctaagtaatctttaagcacagatctctcctatcaacactagtgatgttggatgtaagtctaaaggacgatgtgcacctagatccactagatcaggtatagaagctaagtactcttcttctttcttagatagtttaggaaacagttcagtgaagtctacatccatccaagctccagttttgttatctctagatactaaagatttgtcattctgaatggtcttctgtagttcttttaacttctctaagaaacttctttctatttcatttaacaagttactgttaatttcatctaagttaatgtctagtaattgttttaggaagttacctatcttatcagcaagattaccgttagatataacgtgttctcttctaccttcacttatcataggtagattcttaagttcacctaaagcttgtagtagtagagactctttatcaggtattggtttgtagctagctaagatagctaagatagctgataatttagcattaatctcgtctagagtaagttgtactctaccaatatctctaatcattgtttctagatcaggagagattattcttgtagtggctagttcttctaagatagaatatattaaagcatctctagctgcttgtgttagtgtagagtcttttagttgatttagtttatccaagatagtagaagatgcgtagtgtttagattggattaaatctaagatagctaagtttctttcttctatctcttctggagttaatttagttctagcactatctacaaccaatgcttctaactcaggagttaacacacctaaagcgtttagctgactaagtacactagctataatagcatctctttcttcttgagttaaattagggttaactaattgatatagtattgttaaggattctattatttgtttttgtctatctgactcttggttagttaaagatagtattaactcgtctctttcttctttagttagatctgggttagctactgctctaatctgtgcttctaattcaggagttagatatcctaggtttcttaaatcagctaagatagtgtctagtatagttaatctttcttctggagttagagcatcgttgttaagaagatctaatcgttggaacacagtaagaacttgctcgtgtgtttcttttgtcttatctattatagattgtattctatctcgttgttcttcttcagtgtaggaatcagaacctatgttatttatggaatcagtaacaataggagataccttaccagggagactaagttcttctagcacactttcaattagtaagtctctgtctgtttgagtaaagagaggattgttaagatcggcaatcataccagctaactcaggagtaataccttcttgtttaactatagtagttactacctcaacagtacgttcttccctttcctctacactaaactcaccagtaacagcggtggtgatgtctcttatgtctttatctgttaacgggaaattaacacctagttcattaacgtattcactagtggctaatatcttttcttctttaggtagagtagttaaagatagtagattatcattaacgttagctatggtaggtttaggtaattccatatcgtaccatgaatctttaatgatgaagtctttttgttcgtcactaatctctgcgttctgaacatagatattagtttgtttaggtcctttggtaaatagactagcaaggtaactattactagagatgttgtaaggtaaagacgggttttgatatttgggttcgataccattacgattgatagtcatgaaggtacctaggaactcgttagctgacaatagatcatacatagatccagtcatagcttctagtctaccaagaggtgagagactagctagagactctttactgttctcagagcaaatacgattaagccatgagaaaagtagtcccatcaacagaccactaagaatattcttggagatagcataacctgtaaagaaacctagtaacatatctaggttgttacagaagagagaagctcctacctttaagatacgctggaagaaggatttgaatccagacagatccatactctttaatttatctaggatgttacgaacaaaagctggtagtttgatcttagacatacgatcaactatcttagccattaagtcctgtacaaacttaagtagtttagctggcgcttcctctacagctttcattatgtctttaatcttagactcagcaaactctgccttcttactcattgattcagcaagtttagttaacttagctacaggagcactataagcgtcgttactttggatatcattaaagtccataaccgctagattagtttcacggtctaggactttatttctctgtgcagctatggccatggtaattatcctgttgttatagttccggtagatctacatcagttaagtctacttcatctaacttctcttctttaagactgtcatttaagtctttaagatagattgcagtggtgactaagttactgtagaaaactactggaaggaatgaaaggttaagatacctagaaagaagaaactcagtgtaagagaacatgtcactaaaacctatctctttaatcttcttaagatcttctttagttggtgatttttgctgtagagccgggaagtacattgttacttcttttatatctacgttctctaactgcttggagtgtaaatttatccaagtagtgaagtcatacataaagatagcagcaaacccgttttgcttaatataagcaggtgaaagttgttttggtttaattagaactactgatatcaaacattctgcttgtaacttaacaaagagaaggttctgtatatgttcagcttcttcatgtgttagttgtaacggataagtattgagtactacttctactcgtttgttatctgtatacattccagtcattttctccatagaaagaatcttgtttctaactggagagatgatgtgtgataaagaagacgctggtagtatagacttagtcatgttagcgtgtgctttcttataggcttcatcttctactaaagagaacttatctacatcacgatagttatagtcattagagagtaagtactctataagaacttcagtgtcttccactgtttcaaagagtagaccttgtcttagatccaataaggattctatatcaacatagattttatttgtttcagacatcaatattactcca

SEQ ID NO: 4 - DNA, 148525 bp, bacteriophage
cctataacggcgtgaaatcatcgtcatcgtccattgagttgaatagtgcgataccgtcctctattgcttgtttatctagatcgcttgtattgttatcactcaatgcgttgttatcagctacctctggtcgatctttgtcatcaatagctttcttaccttcgtaagacaatcttctagccttgtcttcagcttcagcaattctttgatttatgtattgttctacctcagtttctcgtacaggctttcctccaccctctaggtagtcgttatactcctgtaggctatcaaacttcgtatccaagttctcaaggtcttctgatttagtaatctcttgaacctgtctataaatttcatctgggtcatgatctggacgaagaatttcccactcaccttccggtttgctccacacttcttcatcgaagtcatcatcgtagtattgagcatctacagtgagaccttttctgtggagttctgcaattcgagcgtcttctaccatagactccattataagctcaacctgatcgtcggtcaggtttctaaacctctcgtcagtaggtaggacgttgaatgttttcataatcatccacaggttccgcatgtaaggtactctagctaatctcttgtaccctcctagcttctttacctcatccttgaaatgtatccagccaacgctggaaatcaaccccaatcttataaagaatctgtgagttatacagattgtcttcattttttagaaaatcaggtacctcaactccggtaacttgcaaggtagctagtgtattaaagacatataagtagtattcactagcgtatccgttagtcccttcaagatagcgaacaacctttgcatgaatcttaccttgttctagaatgttaggtgcccgcactttcaacttaaatttaagtttgagatcaggaaaatcgtattccttctcccacacgtcattaaatccttgaataatcctttgtatctgtttgacctgtttctcttgtttttccgcttcaatttcttctcgggttttctctgtagattcaaaaccttcgagttcttgttcaaagttatcagacatacttactcctcctattgttagtctctttaataatatagcagtaatttgttctctatttatattataacacacaaacggctattaccgtttgtattggtaatagccgtgagtaactctttggatattgttatcgtactgtgtaacttggctcatcagtgcataaggtgagtttgtcggtactcctttttcttctaaagatttcataatgtctttcattttaacaggcatccctgattctttaagtatatttgcaacctgcctagttacctgcttaacgtctctctgtgacgacctcttaggagcttcggacatgtctacaattgcgacacttttaggtttttcttgtttaacttgacttgcactgttattatgtctatcgatagcttcttgaagagacatcatcgctgtttcttttttgttattacttgtttcttctttagacgacttttcatagtctctgtcatctaattctcgaagtctattgatgatcatattgtattcttctagtagtcttgttctctcttcacggatatattttgcatgttcttctagggctgttctttcatcatagactttttgcattactctacttcctccaaccttttaataagttctggtaaaataacatgaatcaacgcttcgtcataagtcgtagttgggcggttaggttttctacaatgactcttgtagtaattagcttcattaatcaatgcttcattcgttaacttcggaggcagcttgtcttgggcgtagctgttcatcctcatatctgctctcatttcaggtgtgatagatcgatcttcaaactctgttatatgcctcgtctcgtctccaaagttaaccaccatagaattatagatttcttcttgctcttttttaaacttctctggtaatctaaaccccatttctttacctcctagttttttcttcagtacctattatatttcaattaatagggttcgtcaatatatttttataaaagaaaaacaggtgatataatcacctgttattttaacactttaacttttagagtctttctcccaaaatctaatgcagcacctttatctggaatgaacacatcgattcgattacctttaattgctcctccagtatctcctgcaatatactccccataaccttcaacatgtacacgagagcctaaaggaataacattagggtctacagcaattacacgttggtttgggttagcccttaaatccaacccggtggcagttacaccagagcagcctgcacagtacgctgtgtatgcggtagcgactactgtaatggattgtgattggttagttgcaacctcctcatttgtaactggttttttaacctgtttcttctcgacttttttaaccttttctttaaccttcttctctttaggtttactatcttcaacttttacctctttagacttctttaacgaagacaataactctaggttctggtatgcggttccagtataccctttaataccaattttctctgccaagcctttacggtggtcgaagtcgaacctctctccttttgatgctaagtagtctactacgctgtaagggctcgtttctgccgatacaacctctgtcccggcaaagactgtcccgatggttacggtacaaagtacgatgccctttttaattaaactcatcaaatactcctctctgtaaatagcatgttttatgttacgtgttataatgtaacacataaacacccggttatagccaatgttacagtattgtaatttaaatgtaatataaaaagggagaccgtaatggcctccctatatttctttaacctcgaacgtttgcacttgttaagaagtagaaacgtgcttgctcagaggtgatttcaccgacactagtagtctcattgtatgtatcgatagagcatccacgatatgcgataacaacttctttagagtagttgtcataaagaacgatatccatgatgtccatttgaagaacttcttcacccaaagcagcaaagcctaacttggctaagttctcttttttcatccggaaacggtctaccgttacactaccttcatatctcaagtatacgtgttcttgaggcatgatagaaccgatctgatagactccagttgttccgaaactacgttctgctgagatagactgagctcgtgcgattggtacgtttttaatcatgaagtacaccgtattagcggaatgtactgattggttagttacacttgccacagaaagtcactccttcatttattttataggtaaggggagatattctcccctagatcattaggctgtgagttcttgatcttcgtaagtgatgtagacgttgatgtaatccaatccttgagaaggttgaactgtgaagctgattcgagcaacgttaccagagatgacaacttgaacatcatctgggttgtagtctacgatcaagccgtcaacattcttttgctgatcaaggaaggattcaacacggttcttgatgatggaagctgaagtgcttcggattctagtaccgatgtactcttcatcaagcactgtacgaatctcagttgttaagaagtcagaaacttctccaagagatactcggttctgtactggctcgctagaaatgttataagtagttgggtcacttacaacacggaagtgagaagaagtacgtgtccggacaaactcagtcatgataattccagagttgttcaactggtctaactgatctccggtgaacttacggtcaagagcttcaacgttcatatgtttatatgtaagtggttctcctacaggaagtccacttgcaatacctgcgatctgagcagcgtacatgtaagctggagcattgtagatacgaccgtctgacattctccgagttacagaatccccaaccaagcttacacgggcgttacggaggttcatttgacgacctctcaagctctcgatagactctgcaaatccgccaccaacaaaacctcttagttggtttccgttgttagactcatcacgtaagaactgagagagttctccatgaatagctgcgttagaagataaaggaacgatgtagtaagcaccgaggtcagcaatcttactgaacattgcagaccatgacgcaggtgctggctcagttttagctcctgccaagtttgttacagggaacgtatcaggcattgctttagtccgatctacttcgatagcgatataagggtcgttagatgtttggtttaccaagtcagccgccactgctgtaatagtaacaggacctgctttgatatccgcagcatctactttgtcaagaaattgagtttcaatgttcttgttaccgccaagtggattcatcttagcttcgaagtcaggaaggttgttgatatcatttacaagtacgtttacgtcttgatatacaccttgacctaattcgtaggtacgaagtgcttgcatactatctgcatcagcaccagcgctaagaacaagtttagtagctagtttagttgcagaatccacttctactgatacagttgcttgagcttcttcacctttatactgaacagtgaagatgttaccgatattgtcgtaagtttgctcataacgctctttagtgaagtacacgctgaaacgtttagagtttgtgatcgtgttgtcgctgtattctacttggatgctattagcatctgcaccgtagagtttagaaacaaacgtcaatgcgtctttactaagttttgcttgagtagcttcatctgtacgtacagcgtaaatacgtccagctcccggcatgttaggagaagggttccaagccatttcaattgcatctaaaagctcaccgccacggaataaatccctagcttgagagaagttagtaatagcatgaggtacttgtggctgtccgccagtagcagagcctaaaaggactaacggcttttcacttgctacgtttgcagagctaaggttactagaatctaagaatacttcagtacgagggcgttctctgttaaatccgtatgatgttgccatattttatatcttcctttctatttgaaattattttaattttagataagcttttagctcatctacaaaaacctgctcatcacgttggtagtgacggccactcattaaagccttaaatcctgctgcctgcattttattcagttcaaacaacgggatagcagtttttaagaatgtatcaatatgaatgtaaggtttaaccggtttaggtgctttctttggctttgagacttgctctgtttgagctttgtcttctttattcactttagccattcgtatcactctcctctacatcgagtctaacgttaacattaatctttttgaggaagtctactattggagagtctaaactgtaggatgaagtataggtaacaatagattcccgtccatataaaatctcagggttcttaccttcctgctctccactgaccacaacctcttctatctggccaaactggacgttttgtaggaggaagttagtatgctcctctttgctggctctcatcaggattaaaatagccttaactactagatcgagacaccttacaacatccatgtttgtagatactaccaatattgaatactgctctttggcagtgaatcctttctttaaaccaacctcgtcacctttagaagatacgtagtcaactactacttctaaaccaactagttcaggatcatacgtgaagtaaattttatttccctcgacagttacattatcacttcgagagaaagttatattctccacattaaaatcgcctataggcttggatacttcgataaacaggttcttgttattttcgtctgcctgtacaattgactcttcttttagtctttcatcctctatgtaactatagactccttctaagttaccgaggctggggctgctctcagctccctctcgaagaccaatgtatatggcaccttgttgggtctgcttatcttgcggcatggtatagatgacaggtatttcttttccagactctccggcatacttctttataaaattttcagccacatcgggctgtatgccttttaatatttcctctataatatagcggttcgttaagataattttcagtttgctcttaatttcttcacgtaagtatgtatcgatactaggcagcatgtgctaacctcctcctatatgtctatttccatccattcttcattttccacttgatcagtctatccacattcttgataaacgtttttgaggtatcgtctgtattgactctgcttcggttgataatccagctattagcaggagatttatctgaaacggttctataagccgtgtaagagtgtctatccttaccgatacgcttcttcgtaatgtttttagacttaggtgtgtagttaagcatcgtagcatctgaattacgccttctgtcatacaaataatcagatacgacagttctttgactgtttgaagacatgttgacctgtctaagctggtcgtacatccttcttgacatgcctttctttttccgtgagataggtattcttaaataccatcctccaccttttttcattttctttttgctactctgtgcaaaataaggtttaaggtcaataacacctagtttatttaaacgagcttcagtaacctctaagtatttaggtttacgagttacttctatgtcactaggacgagagctattaatagcttccatcccggcattaagtgttttttggactaaggcgtttccgaacttctgcatagtggattttgtagaggcgttgttctgaaatagcttaggacgtatagattttctccccgccattacgactctccacctgtatgtctaaagaatccattaagaccatcaaccgcacccggacgttttgtgtcaatcatttgcccggtgtcttcatcaactccaagtgaaaacgcctctttatctataaagtaatcttctcttttaagaagtaacttctgctgggtctttatgagttttccactctgatctcgaccgtaacggtgttcttttagtaagtccgatacaagataacgaagtgttgtggaaatattaagggatacattttcacctaatagagactcattcggatagaacatatttttatctctatcgaatcgataatcggtcccctctactagctcacggtccattactaatgcgtattgaatttcctttacatcatatacaaggtagaaccctctttcgattcttttctcagtgacatcaaagatgaagtgctgagtaacttgcacattcggtagagttatccgatcccggaatgcaagacgagtctctcggtcagccggagtaccaattgcagtacctgagtctacaataccgatatctccgttaaaaacacctttctcctcactctgaatgagcatatctatacctgtaggagggagaaagcctatgccccttccatgacatctaggacaagaggggttaggctgtctagtggccttattcctacaaggacatagataggacttctcccaaagaactggcgtagacatagaccatgcagcggtatctagagaatctggtttaaaggtggcataagctgtttggtttaaaaatgaaggacgttctgccatttaatctccctcctttgatcagacaatacctaagttattgccgtaataagatttaagccctttagttaagtcttcaatgtctttatctagctgtgctatatccgcagaagcagccccgtacatcgcactctgggtggtatcaatactttgttggattccatcaatactcaccgacatgcttgcgatacctgctccaagaataagtctcccccattgctggaatacttctttaagagctgtcttgattactagggtccataaatctgggtgcatttctagctgattggttacccctcttcttttcggtggcagcattcctgcaacgtattctacgtggaatagctgcggggcaaaattacttccgactgtatagggtagacctgcaatcatagggtacccggagtaagcttgactaatgtttaggttattgtacccaccagacaggatcatgttaggcaacatctgaatgtgtcccgggagatggtagattctccaccacgaaggcggataactatacaccgtgttccctccgtactctaagcgaaccatctctacttgtaacacaggcttttggtttgcgtgaatatacataaagctgttaaaatcattttggtagaaatcatggtgctctctaacaaaccgtggaagaattacaatgtctagtgacttctcgatctgtgctacagcttgctcaatcttagcctgataaaacgaatcgggaaggtgttctcctgtacgagggtctgtgacactgataccaaaatggtttgattttaccgcatctactgtaaacccataatctgctaaggtgtatttgtctacttctgaaggatcaattactttagggttactatgtccgtaagggtatcctgcactgttgtctgtggtcattacaattcaccccttacctttctaattatttttcttccttcttcgttgttttctttttcttaggttgagttttcttctctttaggctcttctttagcctcttctacctttgcctcttttttaggcttatctttaacgatatggaagtttggaagtttacctagaaccttctcttgttcaggtttaaggtctttacactcgcctttttcattaaatgaaatttgtccgaactgagttgcgacctgtttatttgcaagtaattcattaactaacatagaataatctctcctcttttattttttaaataaaaagggagcagataatgtgtctgctccctattaattttttaagctattcaattttatctctatatacctgtctattattgaaagcttcttacgtcagcggcaatagcagggatgtatttgacgtttttgatgcgaacccattttctaggagcgtacagagcaagggcaccgtaccataatacagtgaacgtgctagtagcgttcatacgggcaagatcaagtttcatcattggaagaagttcgagcaagctaagaactttagggctcatttctccaaggaatacatcagttgtctcagggatattttcgttacgatcaacgaacacgatctgaccagcatcgttagctgctgacagaggtacacgagcgatcaagaagtaatgacctgtctcaagacctttacggtagattgccacatattgtggttgagcttgatacatagactgtagagatatagtaagttctacagagtctgtagcgttagctacgactgctgtagcttccgcagatggtgcagattcagcttcgtcagaatgtacaacaactttgtaagactgagttgtaaggtcttcttgacggaattgtcctttatccccagttttaacagtagcagctatagtagctggcagtggagcgttagcttgtggaataacgtcctcgataaggatgttatcattctccatgattgtagagccatgaaggttgattttaccacgagcagaaaggaactcagttactgcaaaaccagtagacataccttctttacccggcatcaacgcacgttgacgatcaagcaagctgttagtgaagtcagcttgaacaccgattggcatgaatgcgtcagttactcggccgtaacctttacctacgattacagcagcttggttaaggtctgcttcagtaagagtgcgtccacgaaggtccattacgttatgtttttggtcgataagcttgtgtagaccatcgaactctactccagattgatctgatgtgtcagcagaaaggtccgcatccccgtagaagatagcccattcgatagacttagcgataacagcaatagcatcttctgtaagaatagtagtcggatcagttaggttgttaacaagagttgatgcaattgaaatttgttttgtatcactcaagaacttcatttgtacggttttttgacggatgttagggtcgttgatagaagctactcctacctcacgaacgaaacggctgtgaccagttttaccgtgttgattaaatacagcgtacttagcaacactgctgctaacttgttgtttagcgatcattggatagattgtgaagtcttggttgccataagccaacatcgtaacttcgtcttctaggaattcacgtcttaaagctgctgcgtcatgttgagattctggtgtaataccgtgaccagttgtaaatgttttcgaaatgatttcttcggctgcttgagggagcttacgctctactttttgctcttccttactcatttatgtatcttcctttctaattggtttatatttaatttagtaatgcacttggttatgtactaaagagtagcagaggctaggaggaggaacccctgctacaaagcatcttatatgctcacatcattaatataacacttcgttctataattttttaattttcgagattttttacaacttctctaaacatctctatatcttctgctgttggaacaccacgttttacacgttgtactgcagctcgaaggtcctctcggtaccctaagtctaggttagcaaaattcttagtgtagtatttgacaacatcgctagtatagtcttgaggatcaaacagttcttcagcttcttcaacaacatcttcgccatcttccgcagatttagatacaaactcaactgctttaccttctggctcttcaacaggtttggcgctcttttcaacttcttcaactacttcttcgtcttctttgacgctttccccatcaatagcaacctgaacagtttcctcagtcttagataatttttcaagaatgcttcccaaagatttttcaatcttatcaaggcgaccttctaggttttcttgagaaccttttagcacaccaaaagatttaacaacagcttcaaaagcaccgataaaatcagactcagaaacaacgtcctcttgactagacttttccacttcttcaccttctttttcaggctcagatacttctgcctcttctttaggttccgctttaggctcctctttagattcctcagcttcgtcttccttctcagggtcttcgtctttagaatcctcttctttaggagcttcctctttaggctcttcctctttttcagacttttctacagcctcttcttttttatcttcttcagcaggttcgtcctctttagattcttctttaggctcttctgctgagtcttctttagccgcagcttcctctttttcaggttcagctacttctacaggctcctctactttttcctcagacttttcaatctcttgttcttgcaacttctctaaatcttcggtaagtttagcaaacgattgttttttacccatttagtcatttactcctttccatctgttttattgctctcttgcataatcttatctattttagcgacagcctcattacgagagtatcctttaaatagctgaaggaacattactgctgtttcaggagcgtatctatccatagaatctaggtagtctccgatctccttccacaccttttcaaactcttgagggttgtcgagtattttataggaccaagataagttatacaggctacgagcaaaagtttcggctcttagagccccaccattgacttgggtgtccggtgtaataccatgacccgccagaaagcttttcatgaaagcttcccaagtagcatttggattagcagggttagttgttacagctacgttagtgatgagagttttcttaatgattcttggatcatctttatctcgttctttagcatagccttcaattgaaaaccctagctttctatccacacctgattttgcaatgttattagcaagattccacatgcttttagcataaggattccctttgtagagcttggcttcgacatatagtccaacgttagggtcaacatatgtacctttagtaggggctccaattttaaaatcttcgccttgttggtgctcgtagttaatatatccatgctggataaaatgactaatgtcgattccagaagggtctacaatgtcgtcctgcaagtctaaatcaggagtggtagcataaccacgaagataccaagatttctctgaagtattttcgttactctttttgatcgagtcatctaaatcaataggaacaaatagatcgactttaccgtttatagtatgcagggttacttcctcccttctataataacacaaattgtaacattgcctgatgttatggacttcattgctgtagataatatagcagaagcactacttagttttatttttatcaactttctcatacatgataggacctctacaagatggacaatcccatccttcgagctctctcttcgtagttttttcccagtcacatactaagcagtagttcctaattaacgaatatttcactatgtttacctccttaaaataacttaggaggattaaacctcccagttcagatccacaatcacatttgcacgaccacattgagtgaccgtgcttattgcgacctgcataagatagtgcagtaagcctaccgtacctagtcccggttaagtcttgtaaaataagacacccctctatttttgggatactatatctagccaatatcccaatcatttacggtttcaccgttttcccctttaccgccttgcggtgtagcgttggtgttgttttctccctttaattgaccgtccttgccaacattttggttgtatgtatctttgccattgacattgtctaagtccccattataacctgtctgctgagctacgaattggtgcatttccatctgttcttgtctctttagctgctcttcctgcattagctgcccaagacgttgtacgtggacacctgaaaggataacgtccccgccttcaatctcagggtaaccgagttcagcacgaacatcattaatcgtaagaccaattttagccttcgattcgagcatctcaataatttcgttttcagttttaacgtcgccaccgacaaagttaaatacatatttaccgttcccaagttgagaaacgatgtatttatttactgcgtcctctacgaacttcagtaaaggttctaaccctttatctttagagttacgatacttctccgcagtgccaccctcattcaacgtgttacctgagtgccctgtggctcctcctcggttagggaagttgatctctgatggatcgattgagaaaattgagcagataacgttaatcaagtagttaagccacttctcaaactccatgtctttagacgattgcgtcatattaacaaacttaacgtcttcagcagtgattacaggaattttccaagcgccgtttaatccgctaaacattgattgccattcacgtctaaatgaagttaaagcttgatgagattgctcttgtcctgttttaatctgaaggaggcctctggtcgttccaccttgtgcaaagaaccgagcgttgaagacctcagtgttctcatgatactgaagatggtttaacgctacttctaactctggatacccatacctacctacagtgatgtctgtacgagggttatgtacttcccatgccatttctttggctttaaaacttgctacttttctatcgtctaacatctgaacatatttataagcgttctcacctttaggctctttacccttatcatcaactgcaacataaatagttgaagcgtctaccgccttaaacttgacgagtttatcagggtcttccttgtcataaataagctcaaagttaatcttgtcgtatgtaagtcgatcccgaactattttctttacgaacgttctaaatgtgtcgtttgtaaagctttgagtaacccctgtattctctaaaaacttctctatctcttttatctttttcttatcgtgagtattctcctcagctaaagggtcttttagacggacctcataaccaatacctttatcactgtatctggcaggtgtacaaaacagagaaacctgattgacacgggtattgataattgcgttgaggatgatattcttcctagagtagtgttttagagttttaaagaggttggctgtacctagtatggaaggtgcttctttatagtccgggttcatagacaaattacctagcagcggttcttcgtacgctttaggcttaggatcgttcttacttttcttaatgtactctccctcaatttcttttatcgttacagacagactctcatctatctctttgacattattgaggtgagacgcaaccgtcctactgtcgttgtttaggctgaaccagtctcttaaacccatttgtttatcacatccattctacttataactttcaatcggaaatttaaattccttaccgtcaaaatggaagctatgtaattctgtatcttttgaatacttgaacacctttcgactgttcataacgctctcgtagctttcagatacgggttcccctttactgtccatcagaagaacaagatcatcgtctatgacatcaataatgagtcgtctatctccgtctaagacagagtaaacaaatacgttctccccatcaattgatcggtaatagctgacaatctctatccagttcatatctccgatggctcgtttagcttccatccattttgtgtcttcgttgaaagatgccatcatagcctccttctcatatgtataatatagaactaacaagtctctattttaattatatcacataacactggtgtccctatgattagagaacgacaaaaaacctcacagttgcacctgtgaggacgttttactttagttagttgaaacacttttttagtcaaatagtcaagtcaaagtcaagttttataaataccgctctcagaccgaggaatctcacctcgtttaccttcgctttacccgggacagcggcagataaattatactcatcctgagcggtgacatctgtggtccgcatagctacgtaaaaagctagaggcgtgatgcctttgttgtttgatcgtacgaatctagtgcatgttgttctagcgtatctctgtctagtgaaagtaacaaaacaggagcaacgagttcaccgttgaactagttcctcattaacatcgcattcacaagttgaatgagatggatggagagggaaaaccgaagaccctctcctgagacattcttgtctgcccttttcaggttacacgcccttatcaagatacaaagcgtcttgctcgctcgtctcttctttttgtgtggttttcccagacccgtgtaaggaggtacacaccggaaaataagtagttctgtagttctgtagttcaactacagtcgttcgggataaccccgaaccctttttaaaagaaggtaagacgcatccgacctccttaggtgcaatccgaagatatacaccgcaatcaagataatggtaccctaacccttcgtcaagtacctgcgtaagctccacagttctagcgcttccgttccccgtagccctaacccctaaattctagctacacccttagccccatacactaaggttcctctgcccctaaccctacatcaaggcaccttgctctcgctccacactttcttcagcttgagttcccacctctaatgcgtctttaatccagtattctaagattttcattacccgatttaatttatcaactatcgttattttataccgaagtctatttccttaggatcaaaatactttagttcccagtcatacacatatacttttccgtgagctgccgaatacatcggagcacccttcccgatattgtcatcgtattcaatgtgctcttcatgagaaaaatagacattctctactgtaagcacgtcatctctgtacatagggtatctctccaaccccgatcccctgacttggaacaagtctccctttttaagtactgtacttttctctgtttcaactacctgatctagtaacgttacatgaaagttaactgattcagggtcttcaggatttccgtattcctgataaactccaaaagcataagatttaacatcgagaagatagtatattatgtggtattctatgtttactttcggattacgactattaactttttctgagtgaagaatttgtccgggtaacttcttagcgtaccctgcacctttgtagtttagtggttttagagagttatcactgggatcgacccaccatctacgattctcaatagggtcaacatacgtatctatacgtattgcaggtatatccggtcctccatctctcccgaattcaaagaaataaacagcttcttgaatcaataaagtcacctctaaaaaatagtttttaatccagtcttagtatttggagcatgttttaatacctactactttaagtaagtgagatcatttagtaaacacttacagaaggttcggtataaggtgacatgcttaccttcgaagttttcgtacaaggggttcacacagccctaatgtacaacacacacatttacacgtatagtactgaataactcacacgtagacaaccatgaaaggcacggattatttacatcatacgtgagtttaaaagggtttaaaaaaccctcatccaatacacatatttaacatgtactcgatgagaatttgtaagggagccaagaaagggggcgaataatatgaaaggaggtgatatcggaagctcccttacatctttattataacatatcctgaggttataaagcaagttatagttaaaaaaaattaaaaagaaaaattaagatgggtcatgaagctgaagaatagaattatagaaataagcatccaacctaagctgttttgtttgtctacctttgaccctttgttttttatttctgagagtagacaatacccatgacccactgcacttactaaacaaccaagcatacaagctaagataacgtatagcattttaacactcctcattttgataataaaaaaaaataagctcaatgaatttttgacccatcttctcagagacagggatttttgttctaggaggtgtctatctctgagaagtttatagagtcaaaatacggtgtgtattcattgtcaatttaagcttaactatactataacatactttgtatctcctgacaagctttaaaacgatttttttttatttttttttctgtttatgtcattccactttattttcgtttcggacgtccatctatatattaattctttattcttattctttaatatttaatataaataatataaatatataatacagagcagataaaaattaaataagacaaaaattattttaaaaaccctataaacccttatataccaagggttaaaaataggacaaaaagttttaaggcaacaaagaaccctgagtcaggaatacattatgtctttctgtctagtcagagattcagattgagactctgtttaatttctttaatgtcctattttagactcaggaatatcaataagaactaacaaatttctcagaaaaaatgtcacattttaattttaaccttcctgtattatttattctttattcttatatataatatataaataattaaatacagagtggataaaataaaaataagcaacatttggtcaggaatttctcataagtattgatgtatcaggtgttgaaaatatgacaaaaaaaaagtttgaaaaggatgttgacaattagacaatgaaggtgttattattaagtcaacaacaaaaacgaacaatttctcaggaggaatatcaaatgacaaacgcaactgtaaccaaaactaaaggaggaaataaaatgagtaaaacaccaaagaaactcaaaaagtacagaattgatgcaggaatgacaatctatagccttgcagaaagaatgagtgttcatccatctacagtgagctactgggagaatgatcagaagttcccaagaagaggtaaaatggagcaattagaggatatcttcaatgtgagttggagagaactttttgatgacctttcagaagaagagatcaaggagttagagaaacgtgaaaacacatggttcgggagggaataataaaatgaaatacacgaatgacacggatattaagaatataacaaaagcccaagaagaaagagatggacttctgactagcttgcaatatgctagacttacttcatacgaatcccttaaaaacgactaattttagatgttctagatcggatagtctatgagttatacgaagaccgtattaaagaagaaaagaaaaataaaagacgtgagcagattaatcaggacttagaagatgctatggacttagaatggggatcaggttacggagatttttaaataaaagaccagacaaaacgtctggtctaattttaatcgtatgttacttttaggctaacaatcaattcagggtttacatataccccttcatccgggcctcctgctgtagaagtaacaccgagaagtgttcctcgactacctcggatgtagctggcaatcagagataccggattgtcaggaatacctcctacgtctaactgagagtcaagaacaaaccattttgaaccgtctaccattgtgatttctaacgtttttttccttgccatacggattaccgcctttcttaattttcatttattttcccatagtgttgaatatgtaagtgatgagtcctccaagaaaagccattaaagctttctcaacaatatccctctgcttatcattccctttttctcctttttcgtctagcagctcaatctctctttgcatttgttcaatcctatagaacaggtgggactgtttctcgctatggatagccatgtctttatcaagagattgaacgatgtctctgaggtcattgaccacgtttctaagctctacagtgtccgttttatggttctgtagagtgttttcgatttctttcagcttttgcataatctcattgttttggtaagccactaaaaccccacctttctttatttgtcaaacagtttagtccctctctgtcctatagtgtccagttttgtattgtaattagctaaaaagtcttttagcacttgcatactatgctcgtctgctactttcccgtagttagcctctatatctattttgaagagcgctttaccatgctcttttaggtctaactcaattaaaacacatttgtcagggttgtcgcttttgaggtattgaaaagtgaagtctactaatagccctaaagataatagtctatggatagtgtagacgtggaacactgacctactctggttcactatatcactaattaatccccaaaactcaagtctaattgtgctgtggtacttattttccgttatgttcaagatttagtctcctttctgcgaaccgccgagataagagaagccccgatcagtaaaagaagcatcccatttttagttaagatggagtcgtacataaagttataaaacaggataacatctgatataatagagatataggacactatgataaacacagatgacttaattacaggaacaataagcctataagctagaccctgatagagtatccgggatgttatatatgacacataaacaatgagcatgtaaagcacagtagttattaatacacaagcaataaacatgtatatcatctccgccttatgattctttattaatataagactttgcagtgggagtttcttaatattcgttatcctttatattatatcaaaagacactatttattgtggaggttacacggatgataaataaactaaataagttctatattaaggtcttactcgtttttgtagtagaggcggttgttgctttatgtacacacatgttcattaaaagtgtactaaatttagaccctccgctattggtgtacgtcatcgaaggatcagtatttgctatcatcactgtggtcctgtatgacaaactattgcaaaagaagaagaagagggttgaaaaagagcttaaagaattgaccgatgtggtttttaaaaaatatgacaaaacaggaaagtaggtgcgttaacggtgtttggattaacagaacaagaactcgacaactaccgtagcctcgcccaagattttgcggtacaggatttatcgccaagtgtagttacagcagctcaaattatgacacctgcaactcaagagaacggagaaactgttccggatatggagtttattgagaaattggtaaccgatatagagacagtagctactttaacagtttcacatatggcatacgattacgcccatcttcagagtgacattaacctctctgaagacgaaattgtagagaagctcgaaaacaaatatgaaacgtatgttatcaatcaatttatcaagtacggtatcgtatctagttctgatgctgcaagtgacattgttattcagactttgcttgaactaccttacctctattccagagctgttgaagatgattctttcgatgaagattcttttcttgaggagcgtctagaggcgtataacagctatatcgagaagtattatggagatgctaaggaggaggaggatgacgactaagaaagaagttgttgaaaaaagaaaaagtttatttgattcccagaataaaagatacacgtttaaaaagggagataaacggattcatgcacctcgtctttgcgttgtgtgcggtcgtccgctatcttctttaatactgaatgataacaagtacattgttactcaccctcacattaggtttcacatgaataaatttgtaaaagtttgtatttgtgaaaacgtagagtcttgttacagaacattacgacagaaaggagaaatctcagatgtcaatggcggataacatcaaaaacaaaattaaaaagaaaaaagatagctcaacaagtattgaagatattctagatgtgtttaacgaagccacgtctaaatcagttaagctgcacgtgcaaaaaatgctcagtggagagattgctgtagatagtgtatctgacttacataggttattttcaatctggaaagagattaacgagattgatggaatgattgaaggcggaggcggtcaagctgcactacctgagatcaatatgaagcaggataaagtattccaagatcaaatagaaagcgggaagatttcaactaatgaagaagggaagctagatgtcatggatatggatgaaggtgaaatgtccgagcttattagacaaatggatattgcccagaatagaattaacgaaggtgaattttaatgctaacgaacattgatggaaaattagtagcaaatatagctaaacaaacatttgggcgaaccaagcttacaaaagaggagcttgcttatgtcttgacaatgattaacccctcttcttatatccttaaacatcacagtgtaaaaaaccacccgatcaccttccacgttagtgggcatgactcaacaagggctcaggcacaccgtccgtggcaggtggatattgtcaatgaccagcacccggataaagcggtaattaagtctcggcaactcgggttaaaaattagccccttatcctagtaataggttaatgaaaactccgttaaacgggcatagctgaataaccaataagctggtaagagagcctaagtccttagttttgaaaaggatagtggtaatcccgtgctaaatcagtctaataagactgtaaatgcctaacgactaaacttctaggtagctattcaaatgggagtagtgagaactagataaaaaatctaacaatgtaaaattaagtattgacatatacctacgaatgttatacgttatacatagtaatacagtgtgtggaggtatttcttagacgataatttacattgttagaagtaaagcggagaaccctaaaccaaaaattagggttatgatatagtctaaaccgactagcttgactagtgttaaagtatctcgaaagagacggtagaattgtaagtgagattggtattgcagagatgattcactttgcagatttacatagctacgctggcgttaaatgtctttacacattcccaaccaaccgtcagatggaagagtttgtagctactcgtctaaacccacttctagagacagggtattactctactattgtagacaagaatgcagactcattgaaaaagaaaaaaatcagaaatagcttcttaatcttccgttcatcttctaaaggcgctgcggtagagggtgtcgatatcgactacctttctctcgatgagtacgaccgtgtaggagcttctgcggagatttcagcaatggagtccatgtcttcatctcagttcggtgttcttagacgatggtcaacaccaacagtaccagattttggcatacatgcactctttaaccagtctgacaagagagtttacatgcacaagtgcgatagctgcggaaagcacaacaaacttgattacgaagagaatattgagtgtctggacgagagtggcgtagacgtaatggctaagaccgttaaagacggtacattccgattcatttgtaaatactgcggaaagcctttggatcgttggtacaacggggaatgggtcgcagaacaccctgaccgcacagcagatggaggaggaacccgtggttacctcattactcaaatgaacgctgtatggattagtgcggacgaacttaaacgtaaagaacttaaagccaagtctaagcagcacttttacaactacgttttaggtcacccataccaagacgtagcgctagccgttcaagacaaagacattttagataacatccgtgaagacttaccagagcctctgatgaaccgaggaaactatagatttatttctgtcggtattgactggggtaaccgccactggattacaattcgaggattcagagataatggcagaattgatcttctccgtattttctctgttgaaagggcaagaggcgtagcaaacatcgaagctgatttagaaaatattatcaaccagcttatcccttacagcccggacatcatttgtgctgatattggagacagtggtaactacgttgataagctcattcagtacttcggagcaggtaaagtatacggcgtaaaagtaaaccctaacccacgatctacaggacagattcagcctaaatgggcggacacgcaatcaatggttaccattgacaagctaacacagaataaaaaacacatctcagatatgaaaatgggtagacttggtttctatgcaccggacaaagagctcaaccagtatatgatccactggaggaacgtagttattcgggatgaagaagatgagaagacaggagaagtataccagatcattacaaacaaaggtgatgaccactatgcccaatcatccgtatactcaatggtcggtatggaacatgtactagaaccgtacattactggaactcaagaaaatgcctttaactacacaactgtccaaagttttgttcctcagtctacagatatttttagtcgaggttattaattccataaaattgattaagagaggatttcttcctctcttttttaatggaatgttacagtgttgtgttataataagaacaaggaggttataccatgaggaagaataaatatggactatccaaagcaggtgtagatgagcttatggatcgcctttctaatattgcaaatgacattaaaaaagagagtatagaaggtctattagaagcgcagatcacatccccttttgtcaggtccttgactaaagtaaaaggaatggatgacgtgattgaacggaatgatcagttaaccaagtcatttcgaggtcttttagacatgtatggttttgagactatgtacgacatgtatgtttacgctaaatcttgtgattcatatcctgaagaggttctcaaagctaaagactatagcaaactagtacctgttaagcggaagatcgtacgtaacggtaaggagactgaagttacagtatatgagaacccgaacaaggataaagatgagaaggaagaccaagataacaccgaatcatcttctagaggcactcctagagtgcgtagaaggcacgctagagagcttaaaagagatatgaagggcgaagataagtccttaaatccaaagcacgtagcagagcttaaaatggcagataaaaagatgagcagaggtaataaaccttttcaagaaacttcggagtattacctagtccttcgagatgaagatggagatattcaaggtattgttggatactcaacggaaggtcaatttttaaagatggatttctttagaagctccggagaagtctcaggtatagctgcaagaggttttactgagcttgttaaactggcgctaaagaagaaaaaaggtgttaaagtagatgaccagccagagggtaggcaggtatttgtaaaatttaaaatgaaacaagaaggacaaacttggagtatttcttataaagacttgcaatcgtcttttggggacttctctaaatacgaggaataaagcaatgtatgttataatggttatagtaattgctttatacacccttatcatatctttagggtttatatctgctgctaccgaaaataaaaaagataaatcttacataaaagacgttatgcacattatccatgagattaaggaaatcatacataaggaggaataagttatgaaagagaaacatgaagaaggagtatacgaaattacagactgtactagtgatgtagtaagcaagcatgaagaaggtgaagaagaggaaatcaaagatgtaacaaccccacctacgtttgatgaacgagtaaacagtgtattgtggtattataagttttctatgagtaaaaagcggaactcgggtaaaccatcaacttcagttagagggttatatgacgcccctaccttaaaggaagtagtgacagcccaaccaactgaggaagattatgagtatgctactatccttttagctgctttagttagagttacatacaacaattacaaatttgccctgtataagtctccagacgaaacagaacgggaaaactttttacggattgactgtccatacgaagagcataaatggcttcacgacaaaatttttaagcaaactattaaaaaaggactcgatatgaaaatccttcaggagaaatttgcagatgcagctattgcgggagatattctagaactaggggaaggtattacaatccttaaacatgattctgaaggaagattgatgacatctgtatcacctattaactcaggtctagagggttccgagattacatttatctttagttttgttcagacagaaaactatgaatcttggaagaagaatcattttaaagaagaagtagaaggagagagcggcgatgaatgagaggccacctcttcttcaatctctaagagatgacttcgttcgttttcagagtagaaacactgttggagggatgcgtacagaacatagtattttcatcccttcagaactattaaaggataaagcggaagaaacagatcaatttattagagcagctagagagattaacatgcgccaagattggagttgcaaagttacagcagagcctataactgtaagaggcattaagggtatagagtttgtatttgagattaaaccagatacagacttcgtctcaatcattgaggcactagatactaaattaaatatagattaacctctatattaagatcgtaaaaaattataacggaggtaggtacacatggtaaaaatcagaaaagacctcgtatcttctagcgtcattaaaaacgcatcttacggttacggaaaccctaagagccacatcgtgattcatgagactgccaatcaaaaacccggggcagatgcagcagcgcacgctaggttacaaaaaggaggtaactcaagagccgcttcatggcactacactgtggatgacaaagagatcgtgcagtcatttccggatgatgtaaagtgctggcatagtgggagtgcttataactctaagtctattggaatcgaaatttgtgtaaactctgatggtaactttaaaaaagccgttcagaatgcagcagaactaactaaatacttaatgaagaaatatggcatcccagttaaaaatgttattacacacaatgtttgtacaggtaaagactgccctcatttcttgagaagcggttccaaaggtattacgtggaacgggtttttaaatatgctagatggaaaagtatcagttaaagagccatctaaaagtactagctccgcccctaaaaaatctgctggaagccctgacttcaatacgaatagcgttgtggatttcttaaactccgtaggtgaggactctagttttgctaaccgtaaaaaacttgcggataagtatggtattaaaggttatgaaggaacagcctctcagaatacagcgttgcttgacaagttaaaagcagcttataagaaacctgccaacaataaacccgctgcgtctaaaccaaaaggaaatcaaaaaacaaacagtattgtcgagtacctaaactccattggagtagattctagttttgctaatcgtgaaaagctagcaaaacaatacggcattaaaggttacaaaggtacggcagaacagaaccttgagttattagaaaaaatgagaaaaggttcagctccaaaagcatctaagcctaaaggagatcaaaaaacaggtagccttgtagattatcttaaatctatcggagagccgtccgacttcaatagtcgtgctaaattggcatctaagcatggtattaagaactacaaaggtacagcagaccagaatacagctctccttaaaaaggttagaggacattaatgtgaaagagacttgccaatgcaagtctctttttttttattgacattgtgtaacacctagtgtatacttgtaataatttatactatcctttatacaccttagaatctcaatatgtagtataatagaggtaagggagaaacacttattctgagacaaaggagtaacatctatatgacacaaaaagaaccgctagacctgagtaaactaactaagaacgattttcccatgatcaaaaagttagaccgtgagcaggaagacatggtaaataaactgtttaagtcaaaacgtgttattgttgatgcagtagcaggctccggaaaaacaactgtccttactcaagcaatgaaagtgttaaaggacaaaggaatcatcaaccagatttattatgtggtattccccgttcaagaacagtcattaggatttcttccgggaggagttccagaaaagattagagagtacgctgtaccgttctttcaggcgttagtaaccgcaggagagaatcctcatgtgttggaccttgatgttatgtgtgatgagtttcaccctggagactataaagttgttccccatacgttcctacgtggaagaacaatagacaacgcaggtgtcattatagatgaagtccaaaatggaacagtagatgagatcagaaagactttaacccgtattactgataactgttatgtaggtattgctggtcacaatggtcaaattgacattaacaaagaagcctctggattttcaagatacatacaccattttaagcaaggtaaagaaagagggttctttacagaggtggagttcgctgagttaactaatgattaccgaggaaagttttcaagttttgcagatcaaatataatcaggaggattaaaaatgtcagatttaactgaaaagaatgcaaagatgtacaaatattataacttagttgaggcagcatatagggattttagtaaaacacaagggtgcgactataatgaccccaaactttactcaatgtctctgcatcttttagaaagagttaaacagcttgttaacattatagaggatttagacgataacctagatattcaaaacacagacttacctaaaattgaagatgttgttggacccgatagctctctacatgactatatgcaagctcgaatagagtacgcacatagaaaagataaagaatctttagaaaagttacgagatgcagagtttaatcttagtgagtcattaaaaagtaaataaaaaaagatagaaaagaaacaatccagcacattgattgtttctttttcatatgttacaataaagttatacgaattatacagaggaggatatagaacaatgacaaaggttttcttcgacttcgagttcaccggactacaccaaaatacaacaccgattagcttagggatggtttcagacaagaaggagctatactgtgagtttacagactatgacaagagccaagtaaatgattggatagacaaacaggtgattcaaaacttgatgcttaaagacgtggcggaagatgaacgttttataaaagagataggcagtatgactgttgttagaggggatagggaatttgttaagaaggcggttacagagtggcttagtcaatataaacacggtgtcgaattatggggagacactttaatttacgatggtgtgttatttaatgaactgttcggcgaggctttttttattccggataacgtttattatatttattttgacattgcaactttattcaagttacacggtattgacccagacattagtagagaggcgtttattgaccaccctgtatctggtgcaaagcataacgctctatatgatgctaaggttactcgtgcctgctatgacaagctttcaagaaacagagaagaatatcccgttgttttttaaaaaattttcataaaaacgttgacaatatgttatagtcagcatacactatgaatataagacaaggagaaaataaatgatatcaacctttttctggttttcgacaactgtcggagtgttcgtagcgggttgtatttgtatcttactctgtataagatgcttttatgacttctatttataccgactacttcgggactgtatttgggggcttatctttgtattagtcactgtatctgtgttctatgcttttattatgagtatatccaatttttcaaaatgtattccacttttatgaggaggtaaattatggaacatcaagcgagcttcacttcagtagtcgggtcacacaactataacttagtaacagacaaatctgatttagacaaattgatgtttgtttatcctaattttgaagacatgtataaaggaacgtttgtaaaagatgtaacaatctcaaaaggtgttgatattagtgttcatgatgtaaggaaattaccagagtattttttaaagagtagccctaatttcttagaaattcttttttcagtaaggactgtggtggaagatgagctgtttaatgaattgagaaaagagcgagacaacattgttaaaatgaatctaccttctttttacgaagcatgcagggggatgttcacacagcagcttaaaaaagctcagaaagttcattcggagcgctataagtatgcaaatgaggacaatgtagatgtagttgtaggtaaaagcatcgcatccgctctacgtatttataacttacttactactttccattcacaaggattttctaactaccaagattcgttatggtatgaagtcggaacagtggaccacggcattattgtaagtttaaaaacaggtgaacttaaaagtcgacacgaggagtttctagaagtactggaagttaacgcagacatcattacgacactaaaaaaagattatcgggataatgctattgactatgaaacaaaagagtatgtagatgaagttgttcaaaaatatgttaaaaacaagttaaaagcagaattaaggtgggttaacttatgacacatgcagatttagaatatttaaatttagttaagaaaatagttaaggaggggcataaaaaagaagacagaacaggaacaggtactattagtctttttggtcctcaaatggaatttgacctgtcaaaagggttccctcttttgacaacaaaaaagttaccttttcgaattatcgctgaagagttactatggtttattaagggtgacacagatttaaaaacactacttgacaagaatattcatatctggacaccggacgcttacaggttttacagagaatccggagggacattatcatatgaagtgtttgtagagaaagcaaaagatgacggtttcgatttaggacctatctacggagcacagtgggggagatggggagataaaaacattgaccagttagggtgcgttattgaggaaattaagaataatcctgattctcgtagaatgttggtatctacttggaaccctacagatttatctaaaatggctctaccaccttgtcacaccatgtttcagttctatgtttctaatggcgagcttagttgtaaattgtatcagcgttaacaaatgagcgccttttagtagaaatgctaatcgaataacctgcctaaacgggggaactctcagcagagacaatcccgtgctaaattgaatctaggacttcttatctagaatagcctcgcaacgtacatgttcttagattcataaatgcctaacgactatcccgagagggagtacactcaagcgagtggaaacggtaggagcccgaaagggttgtgatatagtctcatctacatggcgacatgtagcagttcattagagaacgggctaggtgtagcgaacctagttgaagataatgtcaggggacgcctttttaggaatacccttcaacatcgctagctatgctttacttacacatattattgctaaaatgacaggtctcaaggtaggtaagttcattcacactttaggagacgcacacctgtattctaatcacttagactcagcgttcgaacagctaaaaagggaacctagggaactacctaagttagaggtaaaaacgattcatgaggacatccgagactatacaattgatgattttgaacttatcgggtatgaccctcatccagttattaaaggaaaattaagtgttggattaaaagacggaggagaaaaataatgagagaaattaaagttgcattgtgcggtggagtacgagtaggaaaagatacagcagcggagtactttggagagtatttgaatatggttacctttgcgttcggggatgagcttaaaaaggagttccacgagacgtacccacatatcccgaaagaccctaaaccagtcagaggatatcaatttttcggtgatttaatgcggtatgttcacggagaaaactactgggtcgataaatgctttaacaaaattgaaaaacaaagaagtatggctaaaaactatagccagacgtgggtttctgaagaaaacgggatcgccccttatgaaggaccgtcatttaatcctttaataactgatgtaagattaccagcagaagctaagcgttgcaaagaggaagggtattttgtagtacgcatcgtttcccctctagaacagagaaaagagagaatgaggaaagaaggggacctattcaatgacgatgtctttacctctgaagcagaaaagtatattgatagtcttgacgtagactatgaaattgttaatgatggcacactggaagatttcaaagcaaagctgtccgtttctgtggaaaaaataattggatactcacgggtactttaagattagtaggcttcataaaggagcctatttttataaaatatagagaagttattgacatgttacagactatgtcatatactaatactaagaaatacacaggaagtgaaaaatattgcatatatcattaattgcagctataggtcaaaacaatgagattggcttagacaacaagctgctctggaacatcaaagaagatatggattggttcaggaaacatactaaacataaggtggtggtgatgggaagaaaaacttatgagagcattggtaagcctttaaaagggcgggttaacgttgtacttacaagaaatccgaactacaaccctcacccagatgtattagttcgtaaggatatatccgaaataacttttgagtttaggaacgagttagaagttatggttataggcggagagacgatttacaaacagtttatgccgtttgctaacagattatacatcacacatgtaaatcatgaatttaaagcggattcgttctttcccgatttcgacacagaagacgtgtggacacggtatttttaccaagaaggttctgaaaattcagagtatgactatagttttagcgtatataaacggaagctaaatatagaggggatgaggaaaaatgtatgtccatgatgtttgggttaactggttttatggctcttttaaatcttttgagattccagaattccatgaatggtggtctagtgataatgtagagatttacgctacaatgccggttgtttacgtgacaaaagctacactcgatttcgttcaagatagtatgtcggagttgcctgtagaagttttggaccttgttagaaaacgagcggttaaaagaggtaaaggcggagcgaaagcaggggtggagtatgcaatgatctttacagacggtaatcgttcactagcggttgacacagaaggtacggcaatccctcggagaaaaagcaagctaatccctcgtcaagataagcttcttactgagatgattaaaaataaacaggttgatctagaaccatttagttgggactactcaaccgaaagagttgaaccagactacattctatcagtaagtgacagaattattaatgttagacaggagtcaatgacaggtctcacgagacgagaaaaagaattaaagagaaatttgtttgaatatttgtttgagctaagcatctctgattctgatattgaagtattctactggtacactgaactattcccagatagaaaagatgtcagtaagagccgaaaagaaatggtaactgaaatgtttgaggaactggagctaggctggagtgaaaagcatgagaaattcggagagtctttctctagaagtagcccatattactatgatgcttggaaagagcttagtaaagtaaacaaagatttggtaatcagtattgaggaggaataaaagtaatggaagtaaataataactacgcaacaatggccgtccaactatcagatgtcggaaccattacagaactatccagtattattagtaatcgagtggtggcaggtgtttcattagagactatagggggtgtaggtgaggaacatattgcactcggtattcattttgaagacggtaggtatattagggtatggcaagagtctccaacagagtggagtgtaaaattttcagcaagaccagatgaattttctagaacatatgacagtaacagtatcagagacatagaatctactcttctttaacccgtctagataatgatcagaaatggggtgttgttatatatatatatatatcgtagcatagagatggaatgggtttgtgtagcaaggttaatgcgagattaaactaatcttaaattatcgatgtacattagaattatagctttccccttctatattatatagtaggaaatacctcttatgggtatattttccgaaaaaacgttaaaggggagattttattgactaatgggtggatgtacttcattgattttgagcagttcggtatcaaggatgacgggacagatgcaacatcaacaactagtgggttcgtagcagcgtttaaaagggccgtagaactcggtcactctgctgtatatgtaccagaaggtacttatttaattgacgctgtaggcgttggtgactacctccctgagtacggaggaggtcttcagttcccgtccaacattgaagttatcctacatgagaaagccctttttaaagtccaaccgaatgactctaccgggtacgcttgttttaacttagaaggcgtagaaaatgtaacaatccgaggcggacatattgtaggtgatcgtcatgaacacaactacagacaagacgttaacgagaacagacgtactcacgaatggggattcggtatccaagttcgtggaagtaaaaatgttacaatcgaagatgtaacaattgaagactgcaccggagataacatctgggtaacatctaaaggtatgatgaactggccgggagtgtacattccatctgaaagcgtaacaatcaggaaatgtagaacatttagaggaagacgaaataacattgctgccggagcaagcgtaggtctacttatcgatgactgcgatattattgaagcaggcggggacgaaattggaccgcagctaggtattgacctcgaaggctacgcagacaatagcatcaagtaccagcatccttatgagataaatgtgattaactgccgatttaaagacaacggaagaggttctatgaacatcaacgtgtccggtaaagttaatgctatcggtaacttctgcgatgattacattggttacgggttttcaactgacgtaactattagtaacaatgttatcataaacgaaacaggggttcacaaaaaattcgggatagactctattcgtaagtctacttcggaaacagctaacagagtagttgttactggcaatgtaattcgtggatttcaaacgggtatcgctgctagaggtaaaacggttacggtaagcaacaacatcctagaagatattagttctattggaatctacccttatctatgcgatcaagcagtagtatcgagtaatatcatagacagcgactgtctacacatttgggttagagaatcgaagggtataaaagttagcgacaataaaggtattggcgcagctaacaatgtatctataaaagtagacgcctctaaagacgtgttactgagtgataatgaagtttctggaaaaggcggagttcgagtaagtcgctcaacaaatgtgagaattgtcgataatgacattgatctgatcggctcagattatggaatctactttgataaacagtctgaagtacatcttagagataaccttgttaaaaacgccgctttcactgcaatcatgggttatgcagatcagtacagcagctacataaaaggaaacattattcaagattgtaagtacatgatcgctatgcacattgacggtggatcaaaacatatgattaaagacaatgatattacattccgcagagggtctaatgcaggctacggtgtctatttaatcggagcaaatgactctcgtttacataataatgacattagagtaatggatgggtttggccttatcaactctttctacacgatccagtctacgaacactaagttgataggaaatacatatgatacaggtgagatgaaaacaaacgatactgacttcttgcgatacaacgagaagctacctaagtaataaatgagggcggttctccgcccttaaaatatataacaataaagtggaggttttttaattggcagacgtttaccaaaactatgaagaattgagagcagcggaaccagcaggggagtcttaccggattgaggcagctaaaaacagtgaaagattgatatttgttgccccgcacgcaggaggaattgaagtagcaacttcagaactgacaaagcagctttctgattcaactaaagagagctactacttgtttgaaggtctcttatctagcggaaatggaagactccatgtaaccagcacaaacttcgatgagccgtcatgtttagggttaatgtctacacaccctgatgcactttctctccacggatacgcagacagcgcagttaagaatacaatcgttggaggattgaacacagagctccgtaatcttgtagtagaaaagcttcagagtttcggtttctccgcagaagtagcttcagatagatttacagctacagacccacgcaacattgttaaccgctgcacgtcaggtaaaggcgttcagttggagctaagtacattgcagcgtaaatctttctttgagaatggagactggtctaaaggtaaccgggaaaatacgacatcagagttcttccagtatgttcaggcagtcaaagaagcaattgatgtctactacggttctatgtaataatgaagacaacctaaaaaggttgtctttttttttttgtaaaaaggctgtacatattgtaacacatggtgtatactgtgaatatgatacaacataagttacagaggtgaataaaaaaacaaggagatgttttaaatgggaaataatcgtgtattgtgtgatgtttgtgacggtgtttgtggaagcaagtatagtagaatacctgctgaggttactttagctaaaaaatgcgttgaacttgattttaatgtatgtagtaagtgtacggataaaatagatgagagattatctgaagagtataaaggaacacgaggaatggaatttttaaaagaaatgacaagtttgtatatagaaggcggcattccgattaataaaatttcaaaggaggactaggatgaaaaagaccctgcaagatatagagaactggagaaaagttattaatgcaattaaacaagataatagtgaagaagatgcttttaaattagacgatttaaagtgtaaagaagcagaagataaacccaagcaccgatttgacaatcatgtattaggctccctctatcaagaggagggcattttgagacacgaaagttttattacgatagacagttcttgtattaaaaaagataaccttgcaaaatttcaaatagaaataggggataaggactcaggtcctacatcgctctctattctagaggtaccaatagttctcttagacgggagagttcttaaaataagggatattatacaatacacagattctattacctgtggtgtcgaaacagacgaagagggcgttccttatctagttgaatcagatgtaaaaaaggaggtcgaataatggacgaaaaagaaagaaaaccagaagtaagaccgatccgaccctttgttatacagttttcaacagatgaagaggaagaagagttttataggtggttgcactcggatacttcagattctgaaggcgctaagcgtgtgaagcgtgctagaaagctatataaggagcataagcaggctcagaggagagataaaggtgagtaaagttcgtcagttatacgataatacgctgcaagaactagaggatgctaaaagaagaaatgatgacgaagaaatcatatttttacaaggaagattgtctgctctaaaagatgttatggatgtagaggacatggaagttagggataacaggtattggactaaagaagacaaagagagatttttagtaaagtctttgttaaatgaggcaaataatcttatatcttatcttcataatcctcatacgtacgcttactatgatctagagggtatgaagagaataaacagcaaattaaagaatataaagagtgctcttaaagagtatgatcatgcagctagtaggttattatcaaaggatatcgaagacctagacagaaaaataaaagacagggaggtagcaaagtgaagaactgtacaaaacattttaatgaacgttgggcggaaagaatcgtaggtttaaaaacagagaaagagatcaaagattatgtagcaaaaaataaagatcaaattcaagagcacgctaataaaacatttgagtatgcctcctttatatacaaagggcagctatacaataatatcactagaaactactacatcaaagacgatattatttttgtgactaataccacggatgatgcctttattactacgtacaaagtagatatgggttttccgggtgagctaaattctacagtaagaaagggtcttattgaagagattgaacgtcttaggaaagaacagaacgaggttgagttggaagtcttatctgaaattgaaagtaaagagaatgaaattgatgggctagaagatcaaattaaaattatggaagagcagttagccaatctcaagaagcagaaggattttttgaaaacagaggtcaatcttattaaaaataagtctgctaatgtaggtctggagcttaaaaaatatacgttgatgctgataaattcaaaagaatttaaagaagatttattaagtataaaataaggaggtagacattatgagaaagtgccataactgtaaagaatacattccaccggaaacagaccactacttggtcgaaggagaagagttctgtacagattgtgtcgaggcgcaaccgttcaatgcttaggtgtatctcgtgaatgaggagtatataggaaattcagaaggcgatggagacattgaatttattgaaggttgggaagatggctacgaggaagaggaggagtaggcggtgcctaggaataaagataaaattattgaagaaattgaattaatacttgaaaatgtagaagtaattaagtttaaaagagatatgttgaaaacttttagtattggaggcgttaagcgagatattaccttagacggtacgggattggaagctgaagaggtatttatccgtatcgattctaaagccgatacctatgaagcttatcaaacagacatacatcttttaagagaagacttagaatgcctgcctgctagaaagccgtttgaaagactagcgcaatattctgatatcgttaatattgaaattaagtattctgacggttcatctgaagaaatttcagtaaactgggattactacacctctgacgatgtaaattcataccagacaaaccatattagtaggtcaagcggagacttatatatttgtattagtgataacaagtctgttgaagacgctttttacttagacattgacgattatttacacagtgtgaaaggagataattaatatgagatgtaataatcagcattgctactggaatgcttttggctcttgttgtcacgaagaagaggaagcgttcgagaaagcaacacccaatgaactagattgtccttcgtctttaagaggtgactgggaaaagcagtttaggtatctttttgaagagtgcgtagatttgcttaaccacagatcatataaggaactggtggaagttaagaaatttattgaaagtcagcgtgaaaatagttttaatgaagaatctcgtaataagtctgtaagtgagtgggaggtagctgatcatgagggttgataatgtcgaagttagaaaagtagaatatgaaaaattagttcatttggagattgagcatccagtagataattctatcgatactgttgaaattggtctatgttctgtgagggctagtgacgatattcgtataaaatacgactttgaccgtggtgggtgggtaatatatcaacctaaagggtactttacggaagttagtagaagttcaggccgcattgtagaggagtatcacgaagaatggattgaatctgcattctgtccatcttggaaaaaccaaccggaagataagtgagactttctcggtttagaggggaaggaataaaaaaaaatgaccattgtcgtggagaaggtacagtatgaaagtatttgatcatataaagattctttacgggaagtgcagcggctgtcttacgatttagtagactatgatgagatatacttggcttatgatgagtattatgagtgctactatgtaactgatgatgttgataagctttgtgaggagatacaccggaagtggacggatgccgggtgcgataacgatccagaaagtgaagctgatagtattgaggtatggcagtacttacctgcaaaacgtaagcaagattaccttagtatatataaaaagtgtaagccatcactactgaacactaatgtacctttaattagggagaaggttaaaataggttgtgagtattatgtagatttcattataacccgataagaaggatactaaatccttctttttttttgcataaaactatagacaatggaataccttgtatgttatactctggttacagactaattgaggaggtgcctaactttcagataggaacgtgtgaaaggtgttagaataaagatgtattatctttgtacaagggatggtatttatgtggaggttgcacagataaattaattaagatggaggagaataataaatgaggtacgaactagaagttgaagagacaatgcgatttcttgaaagagctactgttgaaaagccggaaaacatgagtgatgaagaggcggaagctattattagcgaggttgaaaaaagatgtcaaagattgatgtactctactggagacatggttaggattctagaagaggagtacgggtttaatcgcgtagatgtttcattatcttttccggaagaaccatactcgtcggatattgagattgtacagattgaaaaatatcaatatgggttctgtccacattgcagaaccttccatttgaagagaggtatttaaaatggcaaaagttaaagtttttgtagaagagaacatccgatactggagtgagattattgtagacgttccggccggaggacatgaacgttgacgtattcgaagacattctagacactgcataacctgataagaaggatattaaatccttcttttttttgcataaaactatagacaatggaatacactgtatgttatactctggttacagactaattgaggaggtcagtaagtaatgaaattcacaccgttcgataaacgaatgaaagaatatgaaaatgcttatagaatgaagctaccaaaacgtatgcctgttatcattagaattgatggtaaagcatttcacacgtatactaaaggaatgacgaaaccatttgatggttacttaacacacgcaatgtgggagacgtgtaagtaccttgctaagaacattatgggatgtaagatggcgtacactcaatcggatgaaatcaatttgcttcttactaactacgaaaaagtaaccacagaatcatggtttaataacaatattcaaaagatagtttctgtatcagcttcgttagctacagcaaagtttaatgaggttatgcgtgaggagtcccctacaacaggagttagtaataagttagctttattcgattctagagtgtgggtgctgcctaaagaagaagtgattaactattttatatggagacagcaggatgcgacaaagaacagtattcaaatggttgcacaagcagaattttctcatgatcagctacagggccttaatagcggacaattacaggataagttgtttttagaaagaggtattaattggaacgatctccctacatggcagaaacgtggttcttgtattaagaaagttaactttgaaagaaatggctctacaagaagtgcatgggatgtagaccttgaaacgcccatattttcacaggatagaaactatatcgagcgttatgtgcattaggtagagcatgtaaggctaaggaggagtatagctatgggagacattgtagattttaaacaaaaacaaacacctaacctgtatatagtagacgactttaaagttattttagctttttcagaagatgaagcttctaaattctacaaagaggaagagatgcttgactacaatccatccattgtcttgttagacgataacaaagagatcaatgttattaaatcgggaaaggttgaagtgatactttggaaaaggggacctaaattccctgagcaactatcttttaatcttacagttagggagtttattagtaaggatttgaagaggtttaaagtacctagtagtatagatattttagaagataagggagcagaagtgcctaaaagataaaggagaggtgggtatgaaatacattgaatttaatgtcaagattaaagttgaagggtcagaaggtcttaatgatttagtagagaaacatggagaagacgatgtactaatcaaagcagaggagtctgttaaagagtttattgagagtatgcacgatgcttctgttaccgatattaaagcatcttttaaggaggggtaatatgccaaagtatagaaaaaatcctgttgtgatagaagccgttcaatacgatggaacaaacgaaaaggaaatagagttatttgtgaataagacaataggcgtgtcggggcttactctagattacgatcctgaagtaaagggctatttcattcgaacccttgaaggccgaatgactgtttctgaaggtgactatgtcataaaaggcgtagagggtgaattttatccgtgcaagccggatatttttgaaaagacgtatacaaaagtggaggatgagtgatgatgaaagcgttagttacagaagagcaggcaaaagcgattgagtttttaaggggatcatatacagatggagaaataatgacaatgtatgtagaggatactctaggctatatcgagatgcggcatggccgggatgtaggttgcttgtacaacctagatgcactggggttagccacagcactaatcaacggatatgaagtcgatacgacgccggaggcgaagattaaagagtattacgaagaggcgctaaggtatcgaagagaaagcgaagatgaagcagacattgaaagtgcggaatatcattctggagtgatagatggagtaacggaaacgcttaccattcttggggttgatattaagggagtaaacgtataatgacaaaagacgaattaaataaaatccataaacgttgggaagaggcgacaggagagtcatgggtgtacgttgagactacagagggatggtatgtactcgatgaagacagtgatcttatttgcggtgaatttgagagagaacaggatgctagatttactgcttgcgctcggagagtcatcccagagcttcttgactatattgaagagctggaatctacgattacgaaaatgtgtcctatcgccgactttccccttgtagactctcttctatcagaaaaagaactcatgctatccgaaatgaaagaaatgaaggacaccattaaggaattacgggggataaataaatgaaaagaaaacagtatgtaaagattaagaaagtaaacgggtctaggtactggtacgcagataagattggtgaaattttcaaagtctcacgagaatacaactccgactatgcggtatataacggaagtattgatgcttgtttagtagctaaagaagacgccgaactcatcgtcacagaaaagcgaccagccaaggttggcgataaagttttaatcctcgacgatttcaacgaaccaaggtacatgcttcacgatgaagttccggttattggcggcgtcgataatcacggggttggagtgcgaaagccgggagagtttccgatatatttaaacaacgagcagtatgaagtcatcgtcaatgacgaggttaaaaacgaggaggctgacgaaatgaataaaatgttagtagatcaagcgaaaactgtgttcgaaagaaaggatgacaaatattttgggtataaatctcgcttaggggatattgtcatcggtggagcgtattcttatgcattcgttgttcactacgcgaaaacaaacgaggatgttgttattatccctggtgatgttaatacggtcacaacaccagtttgcacaacaaaagaagaacgtctatggaagccagaaaagaccgcacaagaacgccgagatgaaatcgttgagcaggcgaaggcggatatcgcaaaattggctccaaacggggtgattaagcgcccaatcggtgaatgtgacgctgaatttatagtcaaccgcaataagcgtaccgttgtcgtattaattaaagggaggtattccggcagagtctacgtaaaaggaattgccaaggccgcaccggacgactgcttcaacgagcatatcggcaaagctatcgctcttcatcgcgcactcggtatcgaagtacctgacgaatatctgaacgcgccgcagccgactgaggttcgtgtgggggatgttgtcggtagtttcgaatttaatgaggtcgcggattattacggaaaaatcgtggatgtgagcgaggataaggttttttataaggatggaggattcgattatttacctacagtaacggaagggattgatgaatacggagaaaagtctttcttaaaaatcatcgacgacagccggacgggggtggaagaatgaacatcggacttgaaataaaacgacttttagacgaaggttatagggtgaaatctgaagcggcgggcagagtcggagaaataaccagtgtgtcaaaaaacgggcataatattcgttatatatttcgtggaggagataggcagtatattgggcttacgaccttcaatatcggagataaagttcgtatcgaaaaacgtgacgatcattatgcggtagtaaacgtgatcgagaactaacgaaagggggagcacgagtgacgtttcacagacgcctaaagacaacggtgtttaagaaatacagcggatatgattggacatacgacggtatgtattccgaaccgagagttaaaggcgctgacaagcggatgcgatcgaagcatgagcgcactatacgaaaacgaattgatcgtaaggaggtaagagaaaatgagcataacgaagatggaaactagagaaatatttgaccgtagcaagatcggtaagggagatgtaattgagtttaatgaatacgagttcaaattactacggatacctcccggatactatgatttaccgactaaaacagttggtgtagttaaaagagttttagaggactcaattgaagtgtatgcacgaagcataagaaaaggtattccagaagacgaatatgtaacaaaaatgaccgtgggagttggtcacgcagactccataaaaattctgtaccgtcatccggcaaatgaggattaatggaggggtagtcaagtgaaagtcaagggtatgcgtgtttttagctacataggaggagtgtattgtgctgcgatgacaatgttagcacttactcatatagatgtgactagcttcatgtggtgggcgttttatgctcctcatgcaacagccatagtaattctaggtattattaattttgaaactttactagatctcgctttcggtattacgaaaagtaaagagctacgttcaaggattgaagatgaagcggagaagacaatgaccgaatttaaaacgttaaaagttaacacagagtccggagaggaaatttattatgtcgagcaagcagatcataaggaggataaataagtggaaaaactcgtactcgaatcaagatcagcattagttttagatgaggatacaaagaaagtgttagaagagttagatcagaaggggctgctagaggaactattacgacggtcagagaatattcttaaaaagaaacttaatgaagatttcttcgagccaaatataaagtgggaaactacaacacgcatgtatgcagtaaaggagggcgaggaccaatgaaatttaaaaagttgagagaccgtattaatgagttgtgggataatgagatgattagtgatgaagctgaggtgtattttgaagataaactggcgggctgtggaggtgctattgatgatgtagaatacatcgacatagataaagatgggaatttaatacttttgaacgctatatgtgacgaggaggagtatgtgtcagtatatattggagccgatagttaccgcaagtaccttaacggagaaataattcctgccttttctgtaaaggacgaacctgatcagattaatataatgatccctgaacaccatgtgttggacgtacgttatatggaagatcgtgaagtggtccggtgctatgttaagcgccccttaacttaaagtatggtaccaaaaaacgccctccctatataaacacggggaggggttctctctactagtttttcttatatgtatagtgatactttgtattgacgaatgactctggatctattatttttccgacatactcggcccatgtttccttttcctcatgtttagttaaaccgagcaccttataaatgtcttcatcaccaacgaccattatcttgccattctcaagtttaatggttagctgctccttatcctctttacattcaagaccatatcgttccgctacttgtttaaccattatattgagctcatctttattggtcattttttccagctcccttacacctttaaatttttgtcccgagtttgctcacgtattcacatattgtttaagataccgatcattttataaaaattttaggtcccaaaaacgtaccccgggtagagcttacataggggtaccttaatctttatgaggatttttaatacggggaggggttgacatcctaactcctccgtggtataatgtaggaaggcaggctctccacctgctcatcctcttaaatgaaatctgattgactgattccattcattttcatttgtctttccatgtcggataatcctgcaccgatctgctttgcttcttcaatactctctattacctctgctatatcacttttgatctcatctaggctgtagccgataaactgaatgtcttcctgcatcatatctcgttcgtcttctgtgtcgtagtctccattgtctagtgcatcccgcaggtctgctaacttgtcaaggtaatcctcctgaaggctctctaagtaatccaactctcttctgtattcttctagtgtcatgtttaaaccctcctgttatttgttatctttattatataccgttattgccttaaagtcaacatgtttttttttaagaaaggagcggattttattccgcttcctcttctagccagtattcctctaagtgttcatataacttgttagctgtgtcgtcaatgacaaaccataccatattgttaggcatatatttgtattcacagtcatcgaaaggatcatacccgatgtcatcaataacatcgtcaatgtattcaagaataagcgtcatataatctctaaacaattcagtagtgtcctcatgggagatagcttctggaacaattccgcttacacacccatgtgttgcaaggtcttttaagtaattaattgcgtcctcttcattgtcgtggtcttccatgttatctttaatgatttcaacagcccataattgcatttcattttcttctgcaatttcagtaattacattcattagtatatccactctggaaatgccactagtcgtatttatcaaatgttcaagctttgtcatgtttattctctcctttgatttgttaagttaagtatatcataagcattgtcttaaagtcaacaagttttcattttaattttaaaaatcttctttccttaaataagtaatgtactgcggtggaattggtttataagagcaaacttcatacccgcatgttttttcaacttcaaaattatccgggatattaacctttaatgtatgcaagtccccttcgtagtcttcaaactctcttcctagccatccatacaacgcatctgttaaatcatcaatagaggggaataaatacaccgcaggacgtgattcgattttttctgatctttggcctataagaggttttaaaccctctttcagtatgctgtctaaactctcgtcagttgtcacatggtataaaatcattttccacctccgttgtacccttttattaattctttaatttcatcataagtatttgtcaccttatgatgatctccctgtactgtagttatttcacacttaaccttcccgttattattcgtttctgttatgctctctatctcccttgggtttatcaaaagcctacacgttttttccactagcgtatgctgaaccataaaccgctcataaaccttggttagttcgataaacatgatatcctcctcctataaaagaagcggattttattccgcttcctcctcgttctctaggtctgctaggagatgccttgctgtgttctcgacgataagccaaacagcactttcagcaaaatccgtataccctttattccgtctttccatgtattcgtgaagaacgtcatatccgtgttcttctttgatctcatccagccgccctaggatgtcgtgcaggtgtgctgtgaaaatggcatctaactcagagtagtaaatagttccgctgacacaaccagaggcacaaccatatgatgtaacatcctctaggtaattgattttttcctctttgctcatgccttccatgttgtcctcaagaatgctaaccgcccattgaatgttagtgtttgtcataataaaatcgctccctttgatttgttaagttaagtatatcataagcattgtcttaaagtcaacaagtttttaaatttattttgtcgtgcttagttcctttaagataccttccactagttcatacacacgatctgaataggttaggttatacaccgcatgaataacacttaaatctcctttcttaatcccgtactcaagatatttaatatcctttaacacttctgcatcccatctacagctaaaatcagaaagacgtgataacaattcatctttaagttcctctgtaaatacgttacccattatagccactcctttaatttgttatctttattatatatccttatcgtcttaaagtcaacatcttttatgaattcaatacgcagaatctaatatccgtattcaatgcttctctgtgctgtgcacccttctatatgatatcgtacagggagtccagcgtgtcacccgcattcagtctctttgtagcattgtcaatatatttgattgcccattcatagtaatgtggtgtcattataaattctcccttatctgatttgaatgaagtgggcttccgttaatgtctctgcgtgatctaacatatgtttcgctacagtttcaagtatataacataccgcaccaatttgaatgtgttcccatgctgataactcataatgtgtctgagaactgaaattatctgcgagggcttttaaaatatcctccatgttatcattaaacagtttgaacgctgtacgtttaatgtcttcccctagcagacctctttcctgagcaccatacattacaatgtcctgtaagtattcaatagtgctgtctacatccaaacctctagtagcattctctaagtaattaaccgcccattcgtaatgttttgtcattataaattcctccttttgttatctttattatatatccttattgtcttagtgtcaacatgtttttatgaattttttaatgcttcttctaaattgtctgccataatacccgctacagtttcaataacacagtaaaccgcttcttctttaaagtcattattgattgctggtataaccttttcataaggcatatctgctagtgccagtaagatgtcttggtaattgtctttgaatatctgataagtgaaggaaagaatgtctgtgttcagtcgctcccatccttttgctccgtagtgtgtgatctctcgtaaatatttaattgtttcatctgcgtttaagccccttgtcgcattgtctaaatgcctgatagcccattcataatagttaggtgtcattgtttaaccctccgtttgatttgttaagttaagtataccaccgtgttgtcttagcgtcaaccctattttaaaaattttttcgacttttatccgatttattttaatttatttaagtttatgaccacttatggttagtttttagcgttttaaggccgttgtgagccgttttaacctttttgtatgtaaataccctaggaagtgattaggaagcggcagaagctaaaatatgaacgatgagggctattctatggtgaccgcccctgcgctccccgatcctctagatgcgataaataaagtctagcttgacaaaggttagaaaaaaatagccggggctgtcaaatggtttcgggtttcgggtttcgggtttcagttttcttattccttatttcttattctcatggttttgattttcttatttagtgattatctctctctatacactccctatatatactacgcattataccctatacgttatacacggtacacatacgctattcatattctatattctaaatcctaaatcctaaatcctaaatcctaaatcctaaatcctaaattctaatctttaatctttaatctttaaacttcactcttctagcttatatcttatatgtgtttaatgcttcttcgatctgctctttaatatctgaatagctttctttcactttataaacttcattactatatgttagtatctcacatctaggcgtatacacttctgataactcaatcacacccctaatatctttaacccgtatcatgagcagtctattatcgaattggcctactcctgttgttagttcaataaacattatttattccttctattctaacccatctagtagcgggaaacatattagtgtaccgacaagacagaacacatataagaataagtttatcagtagtacaataatgattgcggcaagtatagatgctcccatagtgtaagatataagtatacctaataaaatgaatggaataggtgtgccgattaagaatataatagatattagtttaataacgtctgtcattgtttactcctcctatttttattttatttttaatgtttagtccagtatctctaaatctatccatatttttatcacagtcagtaagacagcacataacaccgcagatatgcataggcttaataatagtagcataaagagtgggccgtgtgttatttgctcccctccataggttttgaaaagtgtaatcactagaaaagcagacacagaacaattgatcgtgaatatagtatttgttactatataaatggtttttgtcgttttcactatctattcctcctgtctcctatctcttgtatcttgtcttgttttccatgctatctatataggtgattaaatccttaattgttttctctttaacagtgtgagctaatgtctgagaaaattcgagtaaaatatcttctgtcagttctcctgcatctgcaaaacgccaaacatcattaacaaagtctgtaaccacatttgtaaagtctaatagttcttcgtctgtattctttacgatttcatattctcccttgttcagtcttacaccgccgcaacagtcgataatgacataatgaggatgtgcttcgtctactgtccataccgtgccaatgagtccactgattgttgtgtcttgtttagttttttctgtctctagtattcttactttcattgtttattcctctcctttaatggtactagtcagttgtctaatgtatttgataagtttctttttgtcttcttctgaaatatcttcattttcggataggtttagggattcaagtccatcggctataagttctaatttaagccgttttgcatcgttgtcaagttgatatcctgctatgtctaactttaaccttgctatgtttgactttagccttttgttttcttctaatagtgcggatgtatctacgtcatctggttcaatatctacgctgttaacatagcctattaacgcatctagttctctttcaactcttcgtgtccatgattcaattattttagcatctgatgagcgtacacggaaaggaagatcgttaaacccttctagctgtagtaaaacacttcggatataattcaatgtttgaatgtattctagtctcttcaatgtttattcctccttattatctgggattttacatccgtatggatgccgctttaagccaacttatattaaactcatcaaatttctcaataataaacgctccatgcccatcttcatgcgatatagacatgttatgcttcctgcaaaccttctcaatttcttctaaaaatttttcaactttttcttttttcactaatagtcctccttttaatgactaagttgtttagtcatttctttggaatatccacaaatattgattaaagcatcttcggcttcctctctcgtatcaaattgtgccaccaaacgttcacaacttatcattttgccgcctctgtgctgtctgggagaactaatcgggcaaatattaaacttaccctcaacagtttcgtaaattgccaccaaacgaccagagttaggaaatgagtatttttttaagttagagatttcccttttagataacattaaaattcctccttttgatttataacatccctaaatcaagtatgatttttttttcgaatcgcatcgtcttttgattcaatagtcaccttgatgtttcaagaaactaagtgatgctcttaaattctgttaatctatttatcactctgaaaattcaatatcctctataaacataataacgtgccctaatgtatgctctgagtttttacctttcatgttttgttgctccttcctatccaaccaatagaataatatcatttctgttcaaggtgacaacgtccagtccttcgtattttaggatattgtcagaaggtacatcatagttacccgctttcaagtccttaacaaacttagtgtatacaggcttggaaaaaaccactgtattaatatctttacctactgccttagcgtcctcaatctgtttgtcaatgtgcttcttgacgttcatatataataacatgttattcatttgtttcacccctggttttctggtatctcactctttagctttaatatttaatctttagtcataagtcataagtaaccttttctgtattctatagtttcagtatactgtctcaacctgttttatgtcaatcctttattttttattggcacattctgcacacttatttcggtcatgcgactcccctacaagataggcctttccgcatccactgcacccgctgactctgtaccctgcaagttttgtcattatagaacaccctttcctgttaaaatagattttacgactcttataaacttattagctggtttttggtttttcttaactgataattgattggcttcgatcattgttgtaaagtaattatgtaaattagatgtgatttcttgtttggcttgcatgtttcgtgctcctctctgttcgtctatgtttattatatgttattgttgtcgtaaagtcaacatgttttttttaattttttttatgtatgcggttggtggtgtaccaacctattcacggatatatgggtatattttgtttgtttgttagaactttttgcctgtctgagtttcccactcccagatagtctcaaagtcaggattttcaataactttatactcataaacctcttcaatgaatgccactttactgaatgaatttatatagtcatagatagcctctatttctagttcttctggtgagtttgtaataaaatcttcacagcaagattcccacaagtcattaacattagtgtacactgaaaactctcctgtttgacaatcacggataataaccttgttcatatttaatcattccctttcagttggtatattgttagtatacaatagggttggctaaaagtcaaccctattttagatttttttttagtcgtctcagccctgtaagtaagctttattaaacgccttaatcatgtgcatcatactagggtagtttttaacccttccgtgacgatcatcagaagagaggtgtcttccgtagtatatcacttctgtaccaaattcgtattctccagtgtgtttatcctgttgtgcaatgagataaacttttccatctacagcattcatcacttctatagagactttccaaaagtcttcggtatcctgtgtgcgaggaaagcaattatattccggtatgtccaattcgttaatcattctgtcggcaatttctttaaggtttcttttcatgtttatttcccctttcggtttcccttgcgttatcttatatctttattatatacataggttgccggaaagtcaacatgattttttaaattttttttatagtttatttatttctttctgagcgtgtagccagtcgagaatgtcatgagtcacctcatcaaaactcttatcaaatgggtactcttctgctagattgttttgtgtttcgtcatctagctgctcccaaagaacgcagatgtctttagcgtggcgataaaacccttccagagattgtaccagcaattccttgttatatccttcattagttttcattattgtttctccctttttcaattttagacacttctgttttctcatgtagctgtaatatgtctccggcaaagtgttcaattccatcaccgtataataccttacaatggtaaaatttttgtatcctacgggtgatgacttttattaacatggattcaaatataaacaaatcacctatggacggctgatgctcttttaatgccttcatggcttaaagtaagccccctatcatcccttttctgtttaaatctttctcataagcttttctgtcattcgatcaacatcctgacatattgcatttaccttactaacgtagttgtctacagctttctgattccgcttaaatgcttttaacagttgtttcataggaatttcaccgccaacgtggatacaatacctatagtcataccgacaaccgcaataccaaacataccgtaataccaaaccatatccgataaatgagcgtcctctgtatcaaagaaatacatattagctttcttaactaattttttcatatgtaatcaccctcctatagtttattatatatcagggctggcatcatgtcaacccttatttagctattaacaccagatgtcaaaagcgtatacacctacatacacaccttcctgtgagagataaaaaaggtggatgtatctaaataaccctctttcaattatttccgaaaagttttcaataacagagtgtaagtctacatcgtaaaaaataacactattctcgttgttatagtcttctccaagatcatccatgttttcatatctttccgcatctacagaacggtatatctgttctatttgactatctgttagttctagtgtactccactccatatggtttttaaattcttttaatgtgttagccatgtttaaccatccttttcttgtttatgtacttttattatatcctagagttgcctagaagtcaaccctgttttaaattttttaacttatttactctgtcccagaaacttttaataattttctttttagacatgccgggcgctgaaaatgtgaatgtccttcttgtgctatggtctgtgtaatgtcctgcgtagccttcctgaccttttctcatatgaagaacataatgaccgataacatacttttctaacttgctctcaaggttgtcagcgtatccgttagcctttaaccccattgtctgcacctccttttcttttgttaatctgagtatatcatcatgttgtctaactgtcaacaagtttaatacagattttttaaattcctcaaagacttatagacagctagtagggtttctgtgtcccctagtgtatctttgtttgactcaatatgccagattagattgttgatcctgttttctgtttgttttcccttatttttaagccattcattttccagagctaatttatctagtcgctcatggtagtcttgaataagggctagcgaagtatctaagatagtataggctgtatctacatccatctgcccgtgttcctgtgccatacctaccatatctctaatttggttaagtttaaactttaggatatcattcattttagtttcctcctcttgttctgttaattttattatatgctcctgttgtttaaaagtcaacatgtttttttaacttttttttatgtagcgcgtctctagctgtgaatgttgttctgccattgaagaatcttcttctttaaccgattgtatttgtcccacttttccctgttgtgcggctttgcgtacttattaatcttactttcataagaaccgattaacatatacatttgtaatgattgatcttgattaaactcttgttttgtagctgtatcatttttcattgttataacctcctgtgacttccttatgaatacatcataccacggtattgtctagaagtcaacaggaatttaaaaaattatttatttttctcattagatttctcttccaactcctgtagcctcttctcaagatttctataatattcgtcctcttgcctttgccgctcttctaccgcatccatatacttgcccccgcttatccaaccaaatataagggataaaccaaaaagcaaaataaagaagggagaaggtataagagagaagacaatatagaacataatcacactaaaaattattagcccccatgctacaaaagtacgcattataacaactccctttctctgaggtttactaagttttctgtgtcgtcatacgtatattcagataaaaattcctctagcgtttgcggctgaattttgttttccaaccaatcccgatcaaaaaccacttcaccattgtatccgtacaatttcactgtattcatatgagtaccctccttattaattgttatgcgtttagtcaatagttatgcccgtgatactctcgaatattgatatttcttcttcaaagtacaacctgtaaacattctcgttattttcgaactggataaaagactttgctccgtcaatgtactggtaagtatccttaaatatatttaaatcgccgccactagcatatacggcttcctgtacttcctttaaagctaaatcaaacattgccttaactaaccgattcaagttgactgtacggctgtgggtcatagcgtagtcgattaggtctttcatagggatcatacacccttctaaaatgttcaaatcgttaggactacagtttaacatttcaacaagtagatcagtcattttactgctatcaagcatgtcataacctccatcttctttaaaagttctttttgttttgcatttttattctcctcttttgttttgttaattttattatatgctcctgttgtttaaaagtcaaccatcttttttaaaattctctaagttttttacataagacaagaaaattttcttttcccttaaccgtatagcaggtttatacccttctataaacttccctttcttgatcttatataaagcatcgttagttacatcataatagtaagttgtttccgttaatggactgtagtagccccacccgtataactcgtatacattagtatatgtctgttttgttagaaatgttattttatccgtttcggtttcaataactcctagttctgtcagccctcttcgtcttgacttgtaggaaagcccactgtctgtataaaaccctttaacatggtatttactgacgatatcctttataatgtttattgtttctttctcagcttccctagtcttcttccacagtaacatgaaaaccgttcccctttcttgcttccttctcttcattatacaccgctgttatggcactgacgtaatcagctaactcgtaaggaacaatatcatcaaacgaggcacacttccaatctacattgttagaataaaattcaagtctaactaccattacatactttgcgtagatttcaacaaaattttgttcaggtgatacaagtaagactaggctgttgtcgaaagtcctataagttttatcccctttctctttaataccttcttttaagcactccctaaaaacatttaaaatcatctcatctgtaaggaccgtaattcccattgttaaaacctccattatttttttttgtcgttcgtctaatatcatagtataccggtattgttttaaagtcaacatgattttttaattattttttgatatgttctggcgctttcggtgcaggtgtaacatcgtcatgtatcttcttatatgcagacgcttgaccgtatccccaaccgatatagaaggaaataaaacataacaatgaaataaacacaataaatgaaatagataatttgtttttccttttgtttgtacgagtcttcattacacatactcctctcaagaatctatgactatattatatacgctctgatttctagttgtcaatagtttttttttaattttttttttctgtaatttttaggtaaataaaaaacctgaaagaccgatcccgatgcagggagctacttacgttttagccttggtgtagggagctactaaggtctttcaggtttttgcagggagctacttacgttttagccttggtgtagggagctactaaggaaatcatcaaaggagaacctgttaagtccagcattaaacgttctaacgtactcctcgcccctcatctccttagggatataataggttgagcgtaaccattcaatgttatcttttacaagagacttatgggttacaaaattgaaaccatgataatggataaaatacttgtcctcttgaggacacctatcctcagtatctttcttaacgtcctctgcgaaccattcacaagcagaaggaggataaccaagagtaataccgtagtctaaattagaggtataaagcatagcaagcggagctgtataaaacggagaatcaaccatttttacgctcgcttttttagcgtactctgagaaattatacgcattttggaaaactagggctcgaaatcttcggtgcttatccctaggctctataatcgtatagtaactgtgtgtgataatagacacaacttgttctgccaaatgctctcctatggagttcataaggtctgcatttccatatgacataacactaagcgcaggtttaattccatgcaagaacagccttgtttctgggtctaagtcttcaaaagtaatacctaaatctttgagttcctctctaacattagttgatggcttaaataatccggtcattttaatcctcctatgtttaagtatgacgcagggagctactaaggttagtaagcatcgtcatagtaaaccatgtcaaatgtaagctcttttttctcctgatataactccatgtttgccgaaatgaactgactagcttcttgaactgtgctccctgtaaaaactttgtctgtgaacatttccatacgtttaattaacttcatctgctcttctgttggtggtctcatagcttattacctcttctagtcttttttaaagtactcatcgaaagcctctaacggaacattaactaggttaataggtaaatcatcttcccattcaaaatcctttgactcttctacactgcttactacggtacgagactcaaacatgtcgtcaataacgtctgcgacatgctcaacacctacgctgtcatgaatacgctcatcaatatcaacaatgtacaattctaccttaaaaattttagtcacggtgctctctccttattttggtttcaaccctgtacaggggctacttacgtttttcactttctgtatctagggtgttaaacggtagcagcgtttcagtacgatcaaactctctatacttctctaatacagtgctaagttcgtctgcatacctatgctccccttgtgcttttctgtgagatattttctcttcaaggtagtcctcaaaggtctcttctcgaacatcgtactccccagttgctaaagtgtacattaagtcttcaaacttcactagattcaggcaggcagaactaccttcccaacttcctagttctctgtagttattaccctcccattcaccgaccatcatcttacatatttcttctaaatcaaaggttgacactaagaaattgagcgcctctacttgtcttttggtgtacacaggtggtttcctgagaattggaccgtataagtttgccattatttactcctcctataaagtttttgtagggagctactaagtaactactcccctattctactctgcttgtaattttcttcgctatactgttttctcactttgattcctccttagtactgtttctgtatttctttaatcatgtctagcataagtttttctgcttttggtaggcttcctttccaaataataatcttctcatgagccattccatctctaatagcgagcaacataccttttttcttctgtttaatagcctcactgataagagatagaatagggtaggtatctcttagactaattgttccacaatactggtaggcattagagaagggttttttagatagaaaataaaaaccatctattttttctttaccaccctcccagcacgtttctgtacgtaactcgacatctgaggagcaaaacctttttatgcgcttaatcattttcttttactccttttgttttttacttttcgggaaaccaaatatacttgtatgtcttttttcctccatgtcctcttcttctttgttttttgtgtttttaagagaggctatctcgtcttcatacatttctactaagctttcaatacgtttgttaacaaacttctcagcgttctccatagtcttacggatgctttcaactgtatctttaccagccgttacttttgcataatctgtgtaataaactgtagtgccgtcaacttttttagctaatcgaagaatctcgacaggccctatgtgaggtaacactattatgtctcctacttttagttgacctccttgtacttctccgtcatagataacaatgtttttactacttgagtacccacggtgggcttctagggatactaaatacttagtaggcccgtatgtgaaatgcctttgcacccaacttgaatcgaagttgtagattagggtttcctctttaccgaaaaatacagcttcatgtgtattacccattctctccaccctttctatttttaatctttctaatctcaaaccgccacttgtaagcatctttacctatcttatcgtacagcttccttagtgctttagacttggaaggttcttgaatgccgaaacaatactttttagatactgtgttatatactccataactaatatcttggttagccatacgactttcctccttagtgtaaatacgggcttgtagaaggtaagttaataaagtctacttctgcttccgtgtagtcttcttgataatacatgtctacaataagagacaccagatcatccacttcttgaaaagtggtaatctctccttcttgttccgtcaagatgcttacacagtccttaaaacgagacaacgacttgatcagttcctccgggtcctcaacttgtttttctgccgctgctagaagctgagtaagaacgctgtctaggataagtgccagttgatctttagttaaggcgttcatttactctccctccaattcttcagtgactatactttcttgttcaatcattatatcccctcctcaattagactgtaatcagagtataacatacagtgtattccattgtctatagttttatgcaaaaaaagatgaaggatttaacatccttcatcttcttcattgtgtacatgttcttttagtatttccagagcttccttaatctgtttgttatacttgtctcctttttcggtgtactttagctgctcttcaagctctgcaattacctcttccaccgtagaaaacctccaatacgttatgattctctatgtttcttcattcgagctgctaatgtcaatctctttacaacagcctttcttgttttgatcctgcgtttcttatacaaatgtacctgggctagttctattaagttacctcttgctatctgtatgaactcaacgttatcatctcggtgataaatttccactccgtttatggtctcccgttcattacctgtcacatattcatatatgtattcgtgactatcgtcagagcagctccaagagtattctgaaagagtacctcctatagtgtctacccagatatccttatcttcaattctctttttacagatagggcaagtttctgccattatccttcctcccatgtatatctcactataactcctcctctactgacagctcaagaatgtcttcgagttttgttatatctaaagcgtccatgattttagctagatggactttattaataactgaccgggtattgtgagccatttctgagattgttgcattcctcaacccggacaactcagcaaggtctttcatcttcattcctcgctcttctaatacttccttaatctttaaacgaaacttatagtgtctgatcgccatactgaccactccttcagattttgatagtgttcagttgcttgatgacccgagcttcgttagcctgcttcacaataagtttatcacactcacagtcttgtacaacttggtgtgacaagcagtttagaatccgaccgaagatgtctaggcggtaggggaagttaatcccgtgcctcctgtaccattcttcgttgagctctacatcatgcaaccctgagaccatctgaagaagctcttcatcggttaatctactataatccatttgtacctccgtttaataagctaggtctctctctgtataatcatatgatgatgaagctaaggagaatatcgttccattgtactcaagaacaggtttaattgctacgtgtacggcaacttctagcctttcacggtgcctaccgatgtaatatgaatctctccctgcaactctattgtagttgatctcctccgggcgaggaatgtctcccagtcctagtttagctaggtcaaattgcgctctggccgctaacttcatctcaacttccaccgagtcttctgctcttagaatgttattgtcattcagtaggatagtcgccgtatgtttgacctctgaacgtcctatagttttaaccaccactccatagacaagaactgtacgtattacaggtacatcaagtttagctaacatcgtatatcctcctttagattatccgatagaagatgtcttcaataggtctctaatacaatataagactagagacctttgtttttacatcttctgtatttttaatttcctaatctatatttatacacatcataatcgtgtgattcaatattttcaaaagaccattcttttgtgtctgggttgtaaatagcatccacacggtaaagaaccgtagctttttctttaccgtagtctcttgctgtatacataccaataaccctgaaggtgttttctttgagttcagctacttccacattatccttatcaaaatcatataagtctttaccgtaaagatcataaataaagttttctacctgcttgtgtgcttccttctcatctggcttaccacaagcggctaaagtgaatgcaatcataattgacaagaacaacaccgtaaattttttaaacattttatttacctcctgtagttagtggtcagttatctcgaatagtggaatattccgcataacttatagcctcttcattattaacccttctcagtaaatcttgctgaatctctttttcaatgtccagaataagcgcctgtataatctggagatccctaaacttcccttgtcttttctctagagcgtctttatcttttgttcctaagctcgctgctaaagcgtcaattagctcttcttctgtatctttgtacacttgaagcagcgtttctttaaaatctatgggctccttgatatactctacagaaacgttgtatcccataattatccctcctcaatcctttttaattgtttaaatctccggatactccaagtcatttctgggtgagatgtataccacagacgtttgaatagctcaataaaagcaagcaatgctcgacgattaaacacctctggagcaaacataacgtctttttctaggagctcctctaggttatgctcctctgcaaaaggtttactgtagatttcagtttcatgccaccaactacccggctccctttctactctctcctttaatacaaccactttaccgaggatatgcactgctgctgagttaactaccgttatcatcttagggtcaggtaagccagcaataatctccttcacaagatcttcacgagtcattaaactaatatccttatgatccataaactactcctccttttgtttatctaggtcttcactaatttccttctgccgttccatcaccttttgcatgcctactaatgtctcctcaagcttctctttgaactctttaagactcttctccctcgcctctcgtgttaggtgggaaggagtagagcaaataaatgttgctttgtcctttttgtattcatcacccattactgtaacgcctccctagcttctttttctaactctctaaggtattctctccagcttttaaagcttatccacagtccggtaaacatccctacattcccgacagttaacatcgctatagcaggggcagtccaatatacttcaatattcgatatagcaaacgtccctactactaataagataaaagcgttcattcctgcaattttctttaatttctcccaaaatactggtttccaggttataaaatcgtatttaagcctttgtcgttttaccttttttcttgcttcttttacgataccatccaagtccgactctgtaaaaacctcagaatccagtatacctgataaatactggaggttttttaatgcgtcagatagttcctcattcttcatcaacgtcaccctttccgtttttcaactttctctggttagctgttaaaactgccgcagcaacacacacaatgagtagtgtaatcaacatacgttttattgacccttgaatgaatataaggttaataagcgccgcaaaccctccgatcacccagatattaaccttcatgcctctcaaattgcatcggctcctttaggtatacttcgtttcttttaagctcgttaatagcctttataaccaataagaacgacactgtaatgcctatggctgctccggatagtaatgttaatactcctgtaagtagcaagcgattgctatagtcagacaacatgatgaatcctgtaccgaggaacaacgccacacaacaccaaagagatacaccccaacatttacggaccacttgttcaagcgtgtcaaaaacactacgcttcattactgatcacctcatcctgtattttatagtttcgttacagcttctatacacagtatagtgcagaggtcaactcaaagtcaacctctttttacactttttttaagaagttttccactcacttaatatagggtcctcagcaatgagttcataccctttcgatctttctttatgcttgatgagccatccttcttcaacaagagcacccataaggtctttcatctttgtggtcttaacacctaactcctttctcaaatgttctacccgggtctctccagtatctgcaataacctgcttcagcttattaagttcctcgttgtcttcaggctcttcttctacaatctcaggctctacaactttagggaacttcccattataatactcagacaagtttttatacacttctgcttccttcgtttcgtccggagatataatggcgctctggaatcgttgaaactccttcggatacccctcaatcttcataactccgtcacctttaccgagaagcttatagctgatacctgacccgaacacagttttatagtttgtattattgttaaggttaaagctgatagcattcgggatgttggcttttattcttccgcttacaatgtctgcactaggtctttgtgtggcaattactaaatgaatgcccgcagctcttgctttttgtccgagacgtgcaatgtactcctctacttctttatttgtatcctttagatcagcatattcgtcaatcacacaaacggtatagggcatcttatctggagatttcttattatacaactgaatgttttttacacccgcatccttaaactgctgatatctattttccatctccacaaccaacctctccagttcccgccctgcttcttgcatttccgttacaaccttgttgacatgagggaaatctttgtactgctgaagctctaccattttagggtcaatcataaccattctcagctcttcgggtgtgtagttaaccaacaaagttgtcactaaagagttaataaaaacagacttaccactcccggtggtacctgctactaacaaatgaacaagcttagctaaagacaagtatattggattatttacttcatctactcccgcagcaaaagctaacgggttttcttttttgtacttaataaaatctgactgttcgatgatctctcttaggcagataaccgcaggttcttcgttaggaataacaaatttaactgtatctgcggtttctccttgttctacacctaaagacgggacacctaatgctgcttgaatgtctttactcttctgggtaatgtgtgttaggttctttcctttagggatatcacactgaacaacggttaatcttatccctgctgtcatcgactcattgtatatcctagccttgtcaattagtccaactcgttttaatgactcagcgatcctgccaattagtgtctcgtcagctactacgttttctctggtgtacttaggaagaagatcaatagctccgcctataggttttgtagctgctacttctatagaagggattaattgtgtctctccacctagtagggagaacagctctcgggtacttatgatctgttcacttgtatcagaagtgagtacgcatgactcaaagtgttccgctgctttattgtgtgtctgtttaaacagcctaatggagttgtacgcatcatactgggtaagagcgtttaagatgctacttttaattacctcttcccgggaagtttgcatggcaacccttagttgaaactgaaatccatcgcttagtaacttttcttcaacctcttcaatatactccggtgaaggactaaatgatgcaatcttgttcaataccgacaatgttttctcctgtagtactcggccgatcttagaggatgaggggtactcattaccttctagataacttctatacatgtctagagctttctctttccaattgtacttcttcctaaataaccactggatatacactcgttcttcaccgtagagactgatttcctctgtatcacgtataaattgccctctaagagctccatacagcggcaaaaagtgtggacgagataaatagccctcgtaaaaggtaaaaccgtctgtagaggcttctctgtgctttctcgtgtgttcacttaatcgaatatggggaggtgtaatgagggacttcctcactacacccggtgtcatttcaatttccagtccaaacagtgtgtctgttacctctgggataatcctttgcagggagctacttacgtcatcagtgtccgtgaagcagttggacagatttttataactcggattaactttaagcatcatccttaccacctgttactttttagtcttagatattactcggtcatacactttcttaacggctgaagacggacgggttacaatgtcgatcgtatccttaatatttctttttactttcttcgttgtactgtctgtgtcatacacttcatcaagacctccacctctgtctagatgttttgtcacaattcgtggtggagaagtcattctattgaaacccccgattaccaccaacatctttacaatcatcccggtgatagcagaaggagtcggtattccaaaaataaaccacccaaggataagcaggaacaacgagtagtatacctgaacaagagaaagatgtttcacgttatcccaccattgtcggaaaaggtgtctgtacggatcgaatatccaagcagtcaatgctaaaggggaaacaactcctagaaccataatatcaaagaatcttcggccgttttgccatagcacgggaacaattgatgaaataagaataccatcgaacaaaaccaaggtagccacatcaaaaaatgaaatcgtctccgggagtgagagagcatccattgtttttgaccccatcgatattaatgtgtctgatattttattcagtacttcaaacgatttttgaaatagaaagggaactgctgtaatgatccctgctacgatcgcccaccttttcaggattgttttgaacggcattggttgtgcttttctttttcttagtccggtgaacattagtttaattgattctatagtggtgagaacagatacaacccctattgccagtatgctgaataaataagttgtattctcgaaccattcgttgttaaatatccacagtggtgtcttcagtatcagtgttgcacatagatcatatagccagctcattaagtgtacagacatttctgcaatgttatgtggaaggtccgagaagaaattaacaacagttgttatcgctttgtttattttgtctattgcctcgggtaccgctgtgaatacgttcttgtcttgccaacccatctttagaagatcaactggtgcttttacatctgtagtcgctgcataagctcgggatgttatgctggagattactgtagttgataaaacagccacgggtgctacgagcgctgcctttagaagagaccgcttaaaactggcaagtttttgaaaaccgtctgagtcagatagaacaggaggtacactattggaatcgaaaccagaacttgaacgagaccctttataatgtccgttgaccatgctgtagcttcttctctttttctcatcatcctgtatactcctgctaaggctagtagcgacatcgacagcgccactccaactgacaccgtgattagtgctaaagtgagtccaaattccatcacgactgcgggtgttattgctgttccccctgcttttactgctgttgttcctgctgcaaataccttgggtgaaatttgcattcccaccccacataccgttagagagaccttcagcagcttttttaacttttttattttctttatcttttggttctcttccccatacatcacctcctccttcaaggtctctgccataaaaagcacacggtcttcaaccttttcttttttattccctaatacaaatgtagatgtcgggttaacgtaggtcactccgggaattaactcttttggagagattgtcaagtttatcacggtgaatacctcctctttgtgattttggtttatttgaaaactctggctcgtagctgtggaaccatttcaacgctgcggctaacccagtgcctgcggagcaaactgctgctactccacctatggctaaaagtaatccagacatttttcattcctcctgtataattaaaatgtaagtggccatactaactcttgaaaggaggtagcgaccatgttactacgagataacccgattcctcggtatgaacggcaaatggacaatgttgatcatctcgtacttaacaccattcgagaaaagaagggcgtcaacatatcaatgaaagaactaaatctaatacttgaagccctttatgaatggcgggttctagattgacaatcacattaagtgtcatttccgataacgtttctgaaaacttactcagcgcttcgttcaacatatctagtgcacttagcccgttattcatactcgaatgcgctacctcctttaaacctttattcatatcttgaagaagctgtacgtagggtgttggatctaaatactggccgccctcttttatgccaaagtgcaaatgtggtccagtactaaaaccgctgttccctgagtgtcctattaattctccagcgtgtatggtttggccgttactcaccgaaaagtccgagaggtgtccatagatgtaggttttaccatcggccgcatctatgaacaccgtttttcctgcgttcgtatttccgtagtcggctacacgaattgtaccgtctgcaattgctctaagatcagttccttcagccatcttcaaatcaactccgttatgaagatgatccctgaacggctctttgctgtgaaacccggaagtgatcttgtatttcaaacccacagttttcaccccttatttacgccctattttccttatttccctgaaaaatatacactcaaattccctgtgttttggccgtttttcccttgaaatagcgggaaagatgggaaagatgtagtctgggaaagaagaagggaaagatgcctttaaaagctatctaaacgatcttcaatatccttatcggacaactcttttcgttccaattcgacttttggcagctcttttggattactttgtatgccattttctaggtgtacaacctgtggagagggagaagcagcttttggactgcttctatatttaattccgtctctaacaagttctctgataacgaaggagaagtcataccgctccccgatcagtggatcaatatactggaggatgtcctgatcctttttgtcacttagatagagggttcgtctgttgttcttcctacttttgaacgtactcacgattaccaaccctcaccgtaatgctgcttgagctcgggcgtttaattgtcttcttcgactgacggataccaaacttccttaaccctctcacattagcatatcggtctaagaagactgtattgacccgggtgcaccctctctccaagtacgggcgcagtagctcttggtctgcccctcctccagtaaacacaattgtagtgacgaaaccccatgagttgattagaaccttctccagtgtcgctaggattgtattggcatgactttcataaatcatgtcaatcagcggtgtaatgttcctgttctttatttctttgctcttgataatttgtggcagcttaccatccgggatcataacgtcaaactctttctctaaatagttaccaatctgactataagcggtgtacataccgtcattagactgaacggacagctctggctgctcttccaaagcgtctaaggttagaatgttcagtgttctggctccaatatctacaactacattaaaccctttggctatatccttatctttaatgtctccattgtcgtcaagaattacatcacacaagctcccaaatggttgtttctttatttccaccccttcaacagtaattgtcttcttaacgaagttcactccatcataactaacactgacttggtgagtacctctggcgatgttctctaactctttacggcgttccggtgtgtcgtatttaatcggaagattcatcataagggtatcaattacttcatgttttccagaactcattagacctagtgtagtttttaaaagtactgggaagcgcatatcggcgtgtttattctctccaccagcccatcgaatattaggatcaagcttcatagcgtaatcacccactacatatcttcttcctttaatctcactggcaacgtattgaagcttacttttgtttgaaaactcatcctgcggcttttctttaaatgttgttacgaaggaaggtatgagtgctggaacacctttgctgtcaaatttcacatcaccataaccatcgtctaacgccttcacattgaaattctcttgaaatgtcatacaaatgtcctcctttgaaatacttcagcatactttgtaatacctttgtgattcaatcttatggaaggacaaaattcgatatgtctgtacaaaataaaaaaaaaacaagggataacccctgttttttcatgtatagattgcctatcagtgcagtcatctgtatttatctgcctcatggattatttgcctaaactcttcttttaacgtttccagcgctttttcctcctcaccgagaaagctaacgcctttaatagccttccacaaatactggagtgtacgcgcatgttcaatagccaattctcgaatatactcaactttagcagagctgttctccggtttttctctaagaccttccttgtacccttttaactcgtcaactatctctcgaatattctttcgaagtttcgactcattctcattagccttatggagttcctgaatcgctgctacaaaagttgttggacggatttcagttctttcgttctctgccccatcctccgttgcctcttcctttttatcgaactcctttccaagaaaaataattagctcttcaatccgaagtactaattcaccaaacaagttgtgaatcattttccagtctccagttgtaccttcaaaggccgtagccattgaaatgacgtctgctctaatatccttgagttcttctacagggtcttcccacgcataataattggtgaaaatgttgttaacttgtttacagtagctatgatacaaactaataaaattcctttgtacagtgtccatagaattaatgttctgtaaatcctgttcagtaagctttgccatagttaaacatctcctttgtttttcgtgtatagattgtctatcagtgtagccctctgtatttatcttcctttacttcttttcaattctttcattgtatcacatgtcccagcatggtagccgagtaggtagaaaataaccgccaatgagatggctgctagtataagcatgtcaatcactccgatcgtgtataagttatctgcgacagttcgttctgctcatcgttaattatttttagccacgttcagaaagctttaccatagttaaacatctcctttgtttttcgtgtatagactgccatctcctcaaacagcttatcacaagagttctttatcgtttctagttcactcgcctctccatcaactagactagcaccttccaagactctctgtagatattcagctatacgtgcgtattcataagctcgggcttgaataaacccgtgtatagtggctgtggcaggactttccacaacatgtttatcaagccttctcttacgccttttaagctcattaactgcttccttaatatttgtttgaagttttggctcagtcgtatactccttagcccatagactgcctagttctttatttttcttctcccacagttctttcattgattttgtcacttcgtaatcataaccaaactccccagcaaacttctggtacgctaactttgccatcttacattctttttctaacattacaatctgatcataaatctgttttccgttaacaacctgctgctcactgtttgttgtttggtcactcatcttgctcaccctccccgctttcatgttcttcttcaagcttctttagttttaggtaagccctctttgctctccatagctgtattttggatcggatagcgatagcaggtgctaccggaccaaggaaggtaatgataagaaagaaaacccaccaatacttcattgtaaagtctttaagcatcctcccttcgtatgtatcgtacaaggggctaccttctttaagcatctggtctacaaaaatggacttaaaagcagttaaaaaaccaatagccaaccataagtacaagaaaagtgtaaaataaaacataaataccgtctccttctttactcgatcttattttaaaaagtcattttgattgaatctatatcttttacagagctctgggtcaatgcactcctctttaacattatcaaagacccactgaattgcctcctcttctgagtcaaactctagtgatctgccacgagtgtccttaacaaaatcatttgggttgtagtcatgctcatcgaaccattgcatttcaactacagttaccttacccttaccgcccgctgaatcaacgtacataagaattttataacaaatatcgttcattatagttatccccttccctataccgctttaaagttgtatactggcttaaccgctttgttaacaatcaaggagtcttcaatactacctagaatggcttccataggtatgtagacctttagagcttcgtctaaagttccccaaagataaagtccgcacaccatccatggcatctaagaaatccggcacgcttccggaggattagtgagctgtcagtgcggcttatgcctgtttattttggagatataatactactcgtagtacggtttcgtgtagtccgttactacccttcctccacatgaacagtctaatttcattacttcccacccgtctttctcttctttttgaggctctttaccgcatttattacaatacatcggaaacattaattttttcttcttcgtcatcatttctcacctaccaaagttaataaacgatttgtatcttctgactcatacctacctcattctgaactattcggaattccctaaacgttgaagtaactccagttatctactggaataattacttcttcatcttctgttgcatactatgcaagctaaacctcctatactgaatgctggacatcgttgtcctgagatacttcgcccctctttaaagttctccatgtctcttcagtacttctttaatctcatctgcataaggtttatccatgtctactacgaggtaggctttaagacctttctctcccctttcttctcgtttcctcaaaatacgatcagtaatacgaccaagaatctgtagttcagcaggagtagttacttcgattagttcactcgccttccacaccatgtaatcaatattcttattaggattttgctcttccatgtaataccctccttataaagtctgtaacttctatctgtaaacagtgtaacatacagtcttattactgtctatagttttttattcattttttccaaaaaaaaataagaaggcaacagccttcttattatgctccttagttctcttctgccttcttccatgaagttaccccaaatggagtgttaacagcccattcttcaatcccaaggagaataacctcagcatagtttttcttatctaagtattcctccttcaacttttcaaactcgttggctgaatcgagaatgcgtatagtgtttctactatctgtaaagattcctgcttcttcttttacagcaataaaaatatatttacctctcattctcattcttctcgtcctcctcactaggtccgaaactacgttctgctgagatagactgagctcgtaagactggtacgtttttaatcatgaagtacaccgtattatcggctaacacatactcctgctcagaaataacatgcaacaagtctctctttcttaacttattaagttctttaggaaaactttgctgtccatgtgcacgagcaacaaactcaagaagagctattttgtcttggtaccgtgagttatcaaggagatcacgtagctctctctcttgttcgatactgataactggcggttggtaccctcttgtatacttctcctttcctccgacagtcttaaaactaaacgacctataactcgtgtgctcctcctcatatttactcattttattcttctccgtactcttctagtagtttacaggcagtatctttgataatgatctcaatagcaactttaggaaaggcagtatacatatctttgtaaccacgaacctgcatataatgttgaacaacatcgtacttgagctccttattaagttctgtaatccgttctaagatgtctcgcatgttatctttaaaaatcttctcatcttcttctgttagaaaaactccaaaggggccgaagtttgtatctgaaaagtttacatctggacgagaatgttccatgtccctaattccatcttttaaatatgcaatcatgtcttccatgtcttcactcttatacatctcttttgcaagaatatctaccgcccactgtacattctttcgaatatctgctctcttatatactccttcaatacgtttaaaattcttaaggtttttcatgctttctcctcctacttaaatattagtatacgttactcttcgtttcgttttaatagaggatggctgcttaaatttgatagatgatgtctgagttgttgtaaacttatcaagaccaccagtctctactcctccgccaaatgtaaagtctgtacggattaagtctactgaagcagcagaacttgtaacccacatagatgctgcggaagaattaattacattccatttacagtcgattagctttaagttcttgaaattagttagatagaaagttctccaacgtgcaggcagtgtgcattttttgaactcaattttatctgctttagcatctccaacttgttcaagaattttagcatctcgttttgtattcacttcttcaaaatacatgttgttaatctgttcatttgtaacaagtgtaaagttctcacagccacgcacaattagtttgtcgataattgcctgaacagagccacctgtgtcacgagacttaaacgtacattgtgtataagcgtcaccacctttcacattttcaaatacgatactaccgatgtatttacgtgatgttgtcggttgttgtccccaagcatcaattttatatacggggctgtacaaatagcaatccttcaaaaagaagtttgatctaggtcgtgtttctgctaccataaagctgctgctattacctttagcactctcgttaactgtacatctctctaacaaacaatttcctgccaagtggaatcgtttaattgtacactctagcgcccgtaaagagtagttgttaccatgacagtctagtccggctaaatctacagcgtcatcctgtccgatcgtacatctgtttaggactgtatcgtatgaagtctcttgtccagttgttgtgtatccgtgtctaccactattcaaggtagagtgcatgatcatcaaaccgttaccggagtagttagacacaccatagctttcagaagaacctgaccagtatgctttacctgttttaactcgatacaacaggcagttcaacgtcatatccattttaatgttgtggttaaagttgtctactgtaacattacttacttcagagtatttagagaaacggatatttaagccatactctccatatacagaacttccaagagtaccagtatgcttgattgtaaggtcatctactgtaactgtaatcggtttatatacttcgacttttgctccggacttcatgtcataaggaatacgtctgctgatgtagacattgtttcctgagatttttgtaataaggaagttaccacctttataatagtaagctctagatgtatcgtacaagtctccagtgtgataaattctgatctgatctcctacagccattcctgatgtacttccaaccgttacgtatgtagtgttggctgtatacgctgcggaagtggttgttgtagcctttaaggagccttcaaagactaaacctcttcctttgtgatgagtggcgacaattgttgcgcctttacctagaaaatgaatgtttttaactccgactaggtctttgcttgttttataagttgctccgtcttcaagtaaaagagtcccatttacaggtgtagcgtcaattgctgcttgtaatgcttctgtatcgtctgtaactccgtcccctactgctccaaaagattttacatatacttcgctcattagttggcccctccttcttatctaagtagttaattttttcgtttaagtttacccagtgttgctacaaatgatgaaacaaggaaaacagggtagaatagaatcctaaggatggatagaagtaaaaccagaataaaactagctactactttttcagttagctcctccgaagtactatctttagattctttaagtgtttttagttcttcttctgtaaaaaacgacttaaatgttttgttgaatttaagtcccgcaattaccatcccgattaggatatagatcaggaaatacatctttgactttcacctccttcaatggttagactattgagtttattcttgataaaagggacatgactctcaggtacagtccctgaattaagcatggtttctagtcgtttaattagttgtaatgttttaagctgatcttttacttcatgtgtcattccaataaaacctgccttataacttagttgggtagttactgaattgtgaactagtgaatgcctaattcttttgctttcttttcaagttcaatcagctcaatttctctttttaaatactcatatctacgttgtttctcttgttcttttcgtatcggctcaaatcgcttctcgtaatcctctttattctgcgcttttatggtttctctcttttgatggcaatctgcacaataacgaaacgttaaatctccgttggtcatagtggatacacagtcagtatgaacaattggttctctttttccacactccgaacattttgacttaaaaaatgccattcagttaccctccttataacctagttagcagtatctttagcgtaggattttatatgatgtgtaaagaactcttccctagagttgaatcccatttcctttagaccctcatcaataccttttgcgtctctgtggttgctgtaacatacaaacaacccatttaaacgaacctgatagtctccgtctatcatcttttcaaaagtatatttcatattaatcatttagctctcctccatttattaggatgtctccttcataatactcgtttccatgtttgtcctttactcctgcgtactgcctgacacggattcttgggtggtctaaatgctcgtggaaaactgtttaatactctcccagttatacatttgttcagcatctaaatcccgtgcctgaacttaattccattccgccgcctcccttagtctatagattaaagacggctcaattctaccgggcgcaaaatcaatttcagagtctccacaataagggcaataaactggatacttttcttgttctaacagaatcaattcttcgcattctccgcatttgtactcatacatgactaggtttcttcccattattccgccgcctccaatagaccgggattttcatactcgttcccgataacctttaaattcctcagaaatccgcaagggacattgtgctttcctccgaacgagcagatggtgcgcctttctagcaaatattccgggccgtctccaccaaaagcctgcacaaggtttctcgtttcatattcgaccacatcccccggatagatcattttcccttcatcatctttcacgccggttccccacatgagcaccgcgtctttatcatcgctatatacaacccagccgacgccgaaagcgtgccataagaaccaacttccatcgctttcgatggtcaggcttaccccctcttcatcccaataatgcatccgttctccgtcccacactcgatagtgaagatgtgtcattttttagcctccaataataaatcaggattttgatacacgtcgccgatgacttcgatttcctcaatacgatacagaagtccgcccccatcaacacgaaagctgcatgtttcttcatcaaattcaactttaccgagaacgatgtcatagccaccatgccaatgtgaatcacgtattccttttacgacatccccctcccaaatctcccggccgtttttgtcttttaatccggtgtattgcataatattttcgaaaaatcccgttatatccgcatttccgtagtatacccttccatcaaaaccaattgcatttaaagggctgtaatccatttttttaagtggagcattccacgcccggaatttaatctctctcattccccttacctcccacttagttcttaaccttaaaccgtggtgtaccttttttaactactttaagtcctttgacttttttaacaatatcatcgggcacatcttcaattttcaacacgctgtcgagcttatctgcgttaactcgaacttcagttacctgagaaaggagttcctctttcagcaccgaagatacatcttcaagctcgtagtcagtgtatcgagaagttgagttagatgccttagcatcttcaagctccactcgtttaccaaaagttcctttgatggatttaagatcgttgttttccatatattttttaacatctgttttaacttcgtccatcttactcttcagttcactcatttgagcgtgtaggttaaggtactcgtctacttgctgttgaacggataaggggatgtcttgctctactgaggactgtactactcgttggtcttgttgagatacacccttaccttccgctgctgcaatggtcttattttctgatggattcttcagccacttctcaagctctaaaatagtaactctgtcgtcctcttccggtggtacctcttcccaccctgcattcttaaacgcttctgtaacagactttacagtgtacttattcgtaaacctgagtggttctgcttggccttctcgctcaacctctacacctttggctgtaagcctaacaactgcaacttcaccattttgctggaaaacaaccttgtttttcattactgtatcctccttcattttgtctgtatccctttcctaacataagtataacaacagtcgatctaaaagtcaacactagttataaaaaagttacagagtgcatacagtaataatatctccggttgattagatattattcagccagtactagctgcctttaaatgaaaaattttgtatgtgcagttggtgttttgatttcaatactttccactgaattctttccgatcgatttagaaacagatacataaatagtgtcgtcttctcggcggatatggatattatctacatcttcaaggttaacttttaccatcttttcatgccactgctctaagtcctctgttaagtctgtaataagagaaggatcatgaagactcttcgcttcttcttctgacactcgtgaaggtctagccatagttccttgcaaagttgatttaggatggtctcctgctccaactgaacgtttgtgatgtctgtcaactcctgcctcgtctaagactttataacaaacattcttgttaatgttatactttttaaaaataaattctagaggaactttagctagatagtcgttgataattccttgtttttgttcttttgttagagatgcaagacgtaagttccctttagtaaaatactgcttagttgctctgcgtggaacttgaaagcgatctagtgacgaataaataaatcccgaagatacacgtagccgtctctgaatttctgcaacggttgctcctagttgatacatctctgcaataatctcttgaagggcttctttatcgtctacatcgctaactcgttcagcctctcctttgatcttctctgcctgttgcaataactcgtcaaattcggatacttcttcctcaaaatctctaatcatatcaattaactgttcaactttagacatgttttgtcctccttcgtgtaatggtaaaactacgccagttacctcaaacttattttttcgcccggttctcaacctcatccagaaggacccgtagggcagtgtttacaaagtaagtcttgaatcctttcttaccttctgataagttatctaatcgtttccgtaagttattatcaatcaagaaagttgttcgtgtatgagtatcttcaatagtgagcttcttttgtttgctttcaaacatttcaaaaaactgttcagcataatttttactgtcatcttccgcattttctgttggcaatctttcaatttcttcctcaaaatcacgtgtaatatcgatcaactgtttaactttagacatgttttgtcctcccccatattttcttatattcagaggatatcatacagtctatgttactgtcaacagaaatatgcaaaaaaaatacagggcataaaccctgtatctcgaatctcggctacatacacttatcaagtgttaaatcttcttctgcgtaaatcccgtcgtccctcgacagcttataggcgaacacatccgggtctacaatcgacacgtacacaccctctacaatagccgtatccttacgtccgtcctcactttcataaaacactacatcattaatcataaatttgttggtgtagttaaaggtgttttcttcaaacttaaagcaggtaaacaaagagaggtcattaatgcctatattgtaggtaacccaaaacctctcttcgccttctgcgggttttaaggtaaatgatatctgagagactgtgtgcttcttcttttctaaccgaacaagcacgtctcccccttctcttttttcgaatttcttgatgtacagagtctctccattcagtagtgcttgaagcttttcttcgagagtttcgtacgttatgaagttaagctctgtgtactcattaggttccaatgcaatcatgctcacttctccttcctataggtcaattcccgctgtttttagtgcttctgtaatgcgcttgtcttcctctgtaaggtctaggttcgcataaaagttttcctcagcttcctctaggtctgcaaacagatcatcatgctgctcttctggtacatacttcataatgacttctgcaattgcagattgtcgagcatccatccgtaatttaagctcacgcaacccggcgatagataagccactaagttggttattcgtcagcttcgctttaagttcaatagccttcatggctaacggggtatctacgacatcaaactgttttaaacctttcatacctttacggataacctcatctagaagttcgatatcattatacacctgatccactttactaatgtcatgtactccagcaggttcactagactctttaagtgtgtttttaaatgtgtctactttcttatccgtgatgtatgtgacattgtctttagctcgcttgtctaacagttgaattagtggtttacctgtacggatggcttcttctcgtttcttcttgtagttcgtgagggaagcttttgaaatacttaaaccattctccttacagaagtcaattatataatcatatgatagctcctcgtcaagcatattgtccacttttgtgactaatttcttattgttgtagagctgcaccagtacgctgctggagctaatagattttttcttcatgtcttttttatctgccattttagttcaacccttccagtttagtgtatttattaaatgtggccgaagcctcgtgttttaaggtttctacaataatatagtaaatcgttcaagatatttttaaaattgggtgatttttagagaaaaattaacaatattgttgacttttaaacaataagatgcggattgagatcttgaacatggaaagttcatttaagatatttgttagaaaccttgttcaccttatatatctattatacactattttgtattgttttttacttattggacgtacaaaaaacaaaaaaaaagagagactgttaatcagtctcttcacctaaactacgcttagaggtatactcatctgctcctcttattgagccttcgttcgttaaatccgatatttgtatctcctttaacatcttattgtatatctctacctcaatctgtgggtgtgcgatgtcaaagaattcccagaaagaagtgtagtctaatgtaaaaacacattcattccagatacagtctcccattacctccatttttaattcatatacatcttttaattcatatgtaccttgatcagaagttgccagagccgcatatagatcatacaagctgactcgatagtcttttttatgataaggtacccagaatcttttaagtcgaaggtccgacatatcattaactgctggaacctttctgtgagtgtacatcttacttataaaccaataatactcctctaaggcatgcctatcagcttcactctctttattgtactccgaacccaccgtttagtccctccttagtttcttacatagctttttctgtgcagcaatgtgttcattgacatacaaatcctcttcactatgaaattctatagtctgcataccgggtcgtaattctactgtcgtagaatcatctattttcatcataaacttagcggtatcatcataattatactccgggtgcatcttctgacctcctactccatgaaaattctaatcgtgttcccggcattcttggaactctttagttcaatctcgtaggctccgttactttgtggggtacactctgctcgatagctattgaattcttctcgtggaagtgttacatacccggtaccagaaccaaacacgtagttaccttcagtcgttgtatatgcactgataagctcgtcatacgggaagataacgctatgtactcctgaagacgattctgctttaacccagcggatagcccttcctgtgatattctcgtctacaataaggtccaacaacaactttgtatctctaacactcagttttttattatagaagtgagaaaagattgatagtccgttaggctctgcaaacaaaagagaaacagtctgctcaaactctggaccttcttcatcttcccctaactgatgattaatattaactagtgtaaacttttctcctgcaattgtaaaatcctgatacgtcaattgaggattttccatgataagcagcaggtctaggctgtataagtatctagttacagaaacgagctctaagggcatattgttagtttccccgtcatctagcaacccttcaggagtaaacccaggagcgtctcctgctttatatttctcaagaacatctagtgtgttttcaatctccatcatacctacttcttctaaccgagtagtaaatcctaacctaacagttttattttctacatcaactttatcagataatacgtgtgatctacagaggtatcgtctactaaagaaactgtttgtataggaaattccatatacctctttatcattaagtaagtttttaagtttagttaagctacaatcttttaaagtatttccaccaatattcattttaatgttttccctctcttctagttctatatgattttctacttgcttggcttttttgccctgctgtcctcttcttaaagccgaccttacggctaaatgccttctgtggcggcttaggggcggttttcttcttctggaatacaaatataagcatgtttgatttccaaagcctctgcgtacgtatagacagctttccgtacgtatcctttccaaccttaacgtagtacacctcatctaaggaagttaaagtctgatctccagtcttcttcttagctttcaggcggatcatatctgtaggtactcctacgttagctgacactaaatcaataccgtaaacttttctgagttctatatctttctctgtaatcttatcgtaagtctcgatgaactccagtttgtaatgtccctttgtactttgcttcgatttcttataagcatctttaccgttactgtttatgcctgtaagacctcgggcaccccctccccgtgctatagatcgtgataatgaactctgttttgaatttttactcataatctgtaaccacctgtctgtcttatgtatattatatagcataaaaagaaaaaaggcaacactgtatttaaaataatgtcgcctttataacccatatctatattgtatcatattttttagaaatcctccggttgcatactctctaatgcgttaatagcctgtaaaattttctctttattttgagtcttggtttcgatttctttttctaaacgagtaagttggctgcgtagatcacgtaggatagaagagcgtccttcaatagcgctagtatcttcattagtatcctgagcagaatcaacaacgtaaataccttggctaacaacttttcgagcttcttccacaaactcattaaattcttcttcctgcgatgcgtctactttaaatcgactgttcagtgtgtctaacatactccagtgaattagagcagttctagtgtgaccttcaaagtcttcaggattaaatagcttgttatgtctattctcctgaatgatgtttttgatctggttttcccctctaaaagcgatatatctatcttggctttgtttgacaacataggttctaattgccgctttaactgaagcgtgatcagagtatccttctgtatctctcgtcttagtataatccgccaaagtaatccaataatctcctgcatatcttaccaagttcataatcatggtaataccactcctcctatttaactaaagttcgtctatcgacatttttattatagcactgtgtaaccagtaagtaaacttcctctatttgcctgtgtctttaaaataatggtattttaactgcttatctgggtgcatcctcccttgaatgaagatatcacatagaagctgattagctgcttcttttcctagtctggacacgatcattttagctaagtcatttttagtaaggtacttcttagaagcgttagacttagtatataatccgtgtaagccgttagagcggctttttgctacatctacctttaaccctttctcttccaatgtctgtacctgtttcttaaaacttcctaaaatgttcgataactcctccttccacagcatatgataggccatctctactttcttcttaggtgaacgtacaggctctttgtaaacacccagtattgcatcccccctaaactcagtatatgccaagataccaacatgatgatgattatttttacttaatatctcttctgttttttcaacatgattatcatgacacaacacatacacgtagtcacacacaagactgtagttctttagctgcttattgagtctccgggttgtatcgtactcggttttgatctctacgcctattatccctttctcctgagaaaagattagacagtcggctatagtggaacctataacgatacccttttcaaagagtacagtactactatacccgcttgacaaaaatatatgcctctttttcaaaattaattcctttattttgtcttcgtataactttcccatacacatttctccttgttacaagttagttctcctccgggttatacacgcttgacagcgggttgttcttgtcttggttatttccggccagatcatagaagttactcatgtttttatgtttaacaagagcatcaactatagactttgttggaattgtccacttgtcttcccaagtcaccgcggatataccgataaatactccagtattcttccctctaatcagtttacgcttaccatattctacagattctctatccggttcacgctcaaaaaacccagctccccttctgcctgtaatcgaacaagtgtagttagcaactactggagctgtaaacaacggcggatgtgttacccacttcttatttttctttgttgtaacccttttgatcatttttgttaaaatcggtgaattaggtggtatagctagaggctcctgaacaaatgaacctgctttcttcaacggtttctcgttagggttattcactgcgtataccagcacataagatagcccgggttcttcaatacggtccacaatatagataggctcatcgtctattttaagaataccttttctaatgtatgtaagctcactgctttctggttcaataatatcaaactcgttttccattaccaccactccttgtgtttagcaatttttacaatcttaatattaatatagattatataacattccttgaaattataacataagttacagtcttttgtccactgtagtataaaaaagaggcactattaaagcgcccctctcttaaaacgttttagataactttttaacctcttctgctacttctttcttctttttacgtctgccaatatgaattgtaacagatagagcaaataatgtcgccgcatatgcagtagcacctcggagtaatgtcaccgcagtcataatagctacccccatcgttactgtctcgttaacgtctaaggctgtaaataatagtaaagttagaaataccgttacagcctctgcaaatgttctaagaaccagtgtaaaaatgttattacctgttagagggtgctggccttgtttttttagctttctagactcacttaacaacgcttctaaatttataacaaaagatataccaaccagcgtgtaacatgcaacagctatagtagttaacatactcattactgtgtgtcctccttatttgttagcataatcggaataaaaataggtgtatcgctaccctctgtaagcactgtaaccatctgagaaggtgaagttgttggtaggttcagctctttactgtaagagttagctcccatggtgcttcctacatagatatggaatcttgaaaaatcttcctgaataattcgagtggtatgtatatggcctagatataacaaatcaatcggctcatccttgatgtgtttaggaattttaacatcgtctttcttcttctcgtgatccccgtgtttaaccttaacgtttttacctgcaaccttgactgtaaactcgtatgtatctttcctgttgtcaagtagggttacattaggtaaacctccaaagctctcttgaatgaggaacagcatgtctaaaattatgtatgttacagtgtcattataaatcttatcattcttgttcccttggaatctatcatggtttccagaaacaattccaaaggttacatggatacgttgagatagtgtactaaggaggtcagcaatcactctaaccccttttgcaatttgctcacttgccgggaactcagcatcaaatgcttggttcacgttacgcattgagatatgttcgataatgtctccgatatggaatatgtataagtgtttaatatctaggtcttcaataagctgttgaacttgatcaatcacatcttgaatttgaccttttaacttctcaaagtgatatccgcctgtatcctcattgtatactagggacccgatatgccaatccgagaatgctagaataaggctcttgtctcctttagatggtttagggataggtgttcttagatacttagctctaggcattccgctaagttcctttacaatgctctctttaagtccttcaaagagatgctgagtgtataccccctcccgctgaagttttctaagctctctccagtttgcattcattccttccttatctactacataaggagtaatctggtcaaacaaatttgtctctttcaaagagtcatcttctccgagagctgaagggatgtcgtctaatttaataaccctactgtaggctttaaaaaataaattctctagtgcaggattgcttgagaactcagctataacacgggtaaggtcctgtttcttttgtttcgggtaccctagagataccatttgtttgtttacaacagatggaggcattttacctcgttctgcttttaggtaccctagaattgcggctagggcaccttgttcagttccaagtagttctctctcttcttgtgataatttcttattactcaaatacacccactcctatagtttatttgtagttatttaatatatcaatcttgatcctcggtaaacgaaaactcacagtctaaatgttctggagaatttggtgttctgacatgataaaccagatcataacgtttcccggtatccgtcgaaacatacttattgtaaactgttgcatagcacttgcagtaatcggtagagtctactattaaggcaagacttcccgctctgacacactcgtcaatcgtgcaggtaattgcctcaaacatcttactattaacactacctgattctccacaaaaagcctgtaaccgatactcatacgaaagtctactcatgaaaaattcctccctgtcttctattataccataatattcatgtgttccgttgactttggttaagctgtttaacgatggagttccccacaagttcagagtatccaacaccagagaaaacattagctactgtttctttacccgatccttcgttaattaaatatgctatgttacctgcgtgaactcccttagttcgaatagaaaacatgtcgtttgatttagttgatcttccaatacatacgataacagggacagaatccggctccatgttaagtaaatcatttgccagttcatttatgtactcatcagcgaagaccacttttagtacacatggtactccatcaaactcaatgttgtacgcttttgtcgtctctcgttttcttacaatgtaatcattcattttttccatctgtccttgaattacaggagcatactctttgacaacgtcttgaaggcttttccctttaattaaattaggcagccattttcgacttgcgtggtacagggcgtgtagtactcgggttacattattactactccaagtccatgtacgataagcgttaacggcttcaatcatgagacgtgctttatctgagaaagttacatatttagataacattgtggactcagggtgtagttctatgaacctacaaacatctttaatcgggtccgtgtcttcattcacagtcgataaaatatgtttcccttcgatgcgttctccgtatgtactgctgtgaataaagtccatgaaaggcacatcagtctcagtgtaaaacccatcaggcagtgcgtaccctttataagcaaatccgagtacaagtattacttctgcgtccttaaacaagtgataatctcgaaagtcaaggtgacgggtatactgtatatcaagctgtatctgagggtctagaatctcttgtaaaatagctacactggttacaccttcaaaagtctccggcacaaaagcccgtacccttggtttatcctccattgtctccctcctttatagcagagttattccctgtagttacattctatcaggtataacattgatcgtcaacaaaaatattaaagatatttcagggtttttacacaaaaaaaaagaagagaccgaagtcccttcttttatgtaggttataacactaggaagctggctgcgttttcacctgaatgtagctcattggagactctccaaagctgttgacagccgtaacattgattgacaagttcgtattagctgcgatgtcttctactaagcagctaggttccgtaacttccttgtagaatactttctcagcacctctataaaccttataagaatcagcttctggtactgcgtcccatgttactgtcgctgagtctgaagtactagtgtactttaagttctttggtgcagaaggtacgttagtatcgtagtcttcaccttccagacggaagtcattaacacccattgagtactggctgttagcaaactccaagaaagcaataagaatttgacgtgcttcttctcccgcagggatgtcttttacttcatgagctcctgtgctgtggtagccgtctctgaagtacggatcgttcttaggtgtgatatacacgagtttgtccccagactgagaaacaactgggttcttttcgtcgggtacaaaagactgaccgtcctcagaaagaactagaggtacaatgtcaaaagcgttgtctcctttagatacgattttaaagtggtacttacccaaatgcaagttctgagtttctccttttgtagggaagaaacctacggattctgtgttggctacaagatagtctccgtcattcagagtaactgtatcttgagctagaacatctgaaattttcatattgtggtttactcctctcgtatgaattagtctactttaatttgcttggatacttctgctttaatacgggcttttttagtaacatcgttgttcttccagtaagcatggataaagctccctaccatgaatacaagagaaaccccttgataaatgaactcataatcagcgtcaatattgaaattgaaaccgagggatgctgcggcagcgttaacgatagcaataaggtagatgatagtagtcacaactagtttaggaccaactttaggtgcttcagtaggcacctctacaacttttgcttttacttttttgttttcagccattatttttcccgtcctttcttaaatattgtcctttataatatagcacttagtcatcctttaaagcttcttctaatcgtgttttaataaacatctggacattcttgatcgcatctcggatgtcattagaactaaccctctcattacggtggttatcttttactttcttctcaatctgtccgtcgggcatctcctgaaggatgtagtagagcacttctttatctaggtcagagaatcttacatcttggagggtgtattctaacacttcatagtaatcaagctcttcatcagtcatgctgtttttctctaaaaggttggtgatatcgaaatcattcttagggataaaaactcttttccgatctcggtgttcaccttttatgtacgaatgtttaactcggtaattcaatttagtcttgatatacccggggaaatcgacgggaccgtttatgtcgtattcctttactaatctgacaaactgttcatctatgtagcttttgagctcttcctgtgaaatagggtcagggagacgatctttgtagaggttaaaaacacttaatctgaggttcctatactggtgcataagtttatcaacgtccctcagaaaaacccctttactttcgtttgtgtttaccataaatcgtgtaccattgagaatctgctcttgctctttttcaacatctcttgtcaaagggattctccccctccgtgatgactttaattttcatcttatcgcaataaatgtcagagtaatgaatagtatatggtactttaacttcttgcccgtctagataacaaatggatttacccatagcccatctatcatgaacgtattcgaagcgcacaatcactgtctgaacgctgtacgagtctttaacatcaataagaactcgtttaccctcgtcaatggtcttttgcagcttctttttaatttcctgataaggtgttggaactttcgtgtcattgcttcttgttctctctcgatagtattcgagagtagaagcgatgatatctcccggtgagtctttcatcacatttaccccgccttcctgttataataaagtgaggtaggggattaccctatctcacctgtaatctcgttctgaacatcagcgatcaaatcttctgcaccatttgaatcagtggaaacttcattagaagtagcaacggcttcttgtggagttactttatcgatccaccctgaaatatcaagagtttcgttattaaatacaggatatgtaccttctgggtattccagctctaccagtttattaataatttcctccctcacatgttgcccttccggtgttcgcaaccactcaataaaattatctctcttcattttatgtagttcaccattacgatctacgtactcataactatgacctttgacagagagtaccccatcttcctcagccattttagccaagttatactcatagtctagaccgttatctgagataaggaaagcttgcgcctcttggaaaggtctagacaccttagacttattaactttaataacgaggttatgtccgatcttgtccgtacctttcttaataggttttgacgctctgacaactaatcgaagacttgcataatgctcccaagccttaccacccggtaccttatctacggcaaacatagggtttcctccgatgtcatcccgaacttggttaataccaattagcatagccttagcctctgtaatcattggagcgacttttgttacaaactgagtgatagcttttgctcgggatcctacgttcttatctccgaagtctttttctaactcatcttgacatggcgtgatacctactgagtcccaaacaaatactaccggaactcccggatactttttagtaaacaattcgagacattgctctacagttctaccaatctcttctactgttaaactaataccagacgaaggatcaggctgcttaacaagaatcttactaacatcaatccctaagtgagctaaacgttcccggtctgctgtaccttctacgtcaatcagtacgacaatacatcccaaactagtagcgaccctagatacatggaaagctaaagtagattttcctcctcccggcttacctgctacttcaatcatacgaccaaaaggaagtccgccaccaaatactttatctactcgtggtaggaaagtaggtaaacggtcttttactaaagcgtaatcagagtctctaagaagtgtaagtcctgcatcatctgctagtgaagaaagatcaatgtctacagcaactggtttattctgtttttttcttgccaaattaattccctccgtttgttttacatatttgaaggaggtagcctagtattgtactaaactaccacctataactttgattagttgccgtttagttgctcgtcaagcatactttcgatatccaaaagaccgttgttattaacatctacgttgtgtgtaggtacggtatcttggttcggtgaagcaggagccgtattaactgttggctgcgtaggtgctgttggagcaacatctggtactgaaggagtttcgttgttcgcagtcactgttggtgttgttgcataagggtttaaatctgcgcccgtactacctacgtccggagtaacaccaaaatcagttggaagtgggtctgtaactagaccttctgctggaggagttcctgtaggtacactccctgcctgaaactgattttgttgtggttgtggctgactaggcggttgcgattgctgctgttgcatacctgttggcatggaaatactaggttgttgttgcgcagcaaacatgttaggttgttgcgtatatgtactttgttgctgttgttgtacattaatttgtggctgttgttgagcataagggttagccatcatagaactacccatttccacaggaggttctttagattgattgttaccttgattaggtttacgaccttccttcatatcaataaaagcttggacccatttgtctccgttttccaaacgctctgtaggtactgcgttagcacgtaggtcttctagtctagtttcccatccatctccagaaggtgggagtgtaacgttggtgtacacatcaaccccgtactccatagaacctttaggaggcttagaaattttaacaagtctaggttggtttacatccatgaaagatagctcacttgtaccttctgggcgatatagagggtctcctaggaggttaataactttttgatgtgccgaataaggcatttcaaaaagacgaactactagattaccttgttgatctctctcttgaacgaatgttcctgagttagggtcttgaaaaacttgaacaacattatacaagaaaacctttcttggagactgttgacctccaaaaccgtttggaatcatccctttactactccactctttaaccttttgttccaataatgatcccgggttctcttgagcgtctaaaacaaagttactcttaatttgtttacccttagatgacatagtagtcaagaagattgttctaataggcacgaagaacttactctgtaaatctgcgctaggcataatctgaattaacttagctgtttctccttgggcaaaaaacaaaggtttttgttttctctcagggtactttactttgtcgttgtctcttcctccgctacttgcaagtttttgtgattcttggttaataatatccatgaatgacatatgtataatctcctcctaatttttttttagttactttaacattataacatagtctgtaacttaaatcaatagttttaaacaagttttatattctaatgagttaatatcacttatacctagtgatcgagatttagttactactttatctggctgtctatcactagaggtatccacttgccaaggtcgatcttctctttctcctattctaacccaacgattgtatgcgtctgcagtgcctagttgctctgctccgcacgtgcaatcccaccttaacttaaatggttgtttactcattatttcatctccttatgtttaaataaaatcttgatcggacacgatattcggttcctctacatagtatctagtatcacaatcctggcagtgaaattgcatgtcagtgaggtcctcaacgtaaaactcattaactggtccgcctcctactaagagtatagagtttaccagaactcctccacagtcgggacaaaacatctttatgtattttgcctctccttttatcctatttaccatttactcacctccttaaagtgctatttgactaaaggtggggagttttctattcgagttcccgccccttgtccatacactttgttttctgcaatctgcttaccataagactgtaacatgtctttcctctgttcaaaagccttcacaatacgttggacacgacccactatgtacttgtagtaaatctctttgtctttagctgctttatacttatcagttctttttatgtaagagtctacactgtctttggtgggtttctctcccatagattttatgtgttctcgtgcttcattgtcgagtgaggctacaaccctctctaactctaactctacactttcttggaagtactttaatttttccagaacagatgaccagtatatgtacttcgaaggctggtgtaacatttctaccatgaggttatcttcattaatcgtcagctcttcttttaacttatgttcgacccatgttccatcttcttcaactaatcttagaacatcaaaatctaaactgccaatgttaatatccaactatttatcacctcgcttatgtcgaaaacaaggaagaggtagaggctttatcctgctgcctcctccctgtaactatatcttactataacctgttctgtatgtcaactgtaatttacaaacttttttcagtttttaacccgcattttgatatacgtcctttttgctttcaacagcatgtttgagctcttcatacttctcttctgtaataacattggagttcttgtaattcttgatgttcttcaggtccaaatgatatttacagtagttcttaacacagcggaatgtattgatctcttccatgttatagtctaccatgtcattgtagttaaccccgatctctacatcagcagcgattggataacggagttttccgcctttccagtcaatgaacaaccaatcaattggtaagttctccatgatgtgcttagctgctttagccatgatgtgaatttcttctggaggacagtcgagtacaatggagtcatggactgtaagaattactctagaacggaagttgttccgctcaataaaattcataatatgtaccacagaagagttagtaagaaacgcaccagacccctgaattttcgtgtttactgactgacgaagtgctgcgttacgtttagatgagtcacgagagtatacgtcttgcagatttcgtctaaatccatgcaaacattcaacgaacccttcttttttaacctgttcgtgtacatcatcaataaattgtttaattcgaggtttattcctgaagaagtcgtcaaataacttttcagcttgctcaagagtcatcccgtgcttagcatagtaactgaaaggtgtctctccataagcgatgccgaaggttgttgattttgcatcagaccgcatatcatctgtaacttgttcaataggaacattaaacaccaaagaggctgtatctttatgcacgtcagccccgtcaaggaaggcctgtgtcatttcttcatcctgagcagctaatgcaagtacacgagattctagagaactgtagtcgagctgtagaagtgctccaccttcaaagcttgtaacaaacatacgtttaattggatgcttgtagtcaaaccgagttacatcccctgtctttcttggcatttgttgtagattcctgtataccgtctctttcgagatactttaacactggctgtaccagtcggagtagactatatcttgttatgtatacgggctagtgtatactttcatcgtgttccttttgtatagtaagagtagttgtctttggggttattgtacttccagtgataccctcccgcagtaaaccttcgtcctttaattgtttcagttatcttttcaggacgagcacctgattccttagcggcttctcgtatagaatcgaatgtttttaagaaagtttttccgtctttactatacatatctactttctttatcaggttctttttatgggcttctctggctgtatgggtattcagcgcattacgatctttcatttctgagatactttctttataggtcatccactctaagttggaagcgtggttattaagtcgattagtgtcaatatgatttaccactaacccttccttataacctacacagaaagctttggcaactatccggtgtattgtatctctgaattttaccttttttgtgttaatctttatacactcgtaaccgctattattaacccatgtctttaaaattttacctgtactcttatttttaactttacctgtgttgcttattgcgtatccttcagcttcaggaatgtctctccagattaattccatttttcctccttcagatacacagcccgtttacataactctcggcactaatgattgattattgctttgcctagctcacaatctagtcgttgaaccttcctcatacttattggcatttcagaggcttggctgcggattatccaatctccattctttttaccttacctgagtagttagttcagccactatatctgtttccagtatagcttggtaaatggagctctaaggacgtccccgcaattcaccgagataccccaattctacttagggctctgtgatgataagcgggtagtagtggttcccgttaaattgaatcccccgtgaagtaatccgttatgatcgaccatacttaacagcttatatgtaaagttctgcttccgtgttttaactaacgagtgtgtaagtaacaagttagcaagctccgcagactcttcgaaattctctgccacatagtttaaagctgccttattagctctgtagttgtaccattgaacttcgtcttccggaataccatcttcaaaagcagaatccgttaaaaactctttattatacggaagcctgttacctgtgtattcatataacactttctgcttatctactgaggcgttcgggttaaatacaagcttatctttatatcggtctcttaacttagcaatctcttcatttcgatctgcttttggttttagcatctcctccataccacgctgatagagggttctgtattcctcttcaagtcgctgtacttccggaaatttacgcatctcttcgagcagcctgttttcttcttcctcatatttagtaacaagcccttttgtatactcagtatccatcttaacaccgtttgcttcaatcttagctagcgctactgtcagctcaggatacgcctttgtatagagctctctaattctagcattttcttctttccgccctactgcgtctaatttattgtatatccgtaagcaagcgtcagtatctccagaagcataagggtgtaacatagactttagcggaatccactcgtaactgaagtcgcttccgtctacctcattaacaggtgcgtcagtagaaggaaactctggtttttctggaagaactggcggacgtttttcttgtttagcctgctgtttttctagagctactgcttctctatactcttgtttcattcttgctttttcttccttagacttttgaattgcttctttaacatactgttttttaaattcctctagcggcttatcataaccacccatatcagtcatttcataacttagatcactcaattttaatgaggactctacatcctgattgacgagcaagtagtacataaccttcgtatctcggtggttcttaaactcagtaaaccctttaacaagtcggaggaaccgaatatcgtattgcactgaaaccctaatctttcgatcaggagcggactataccttcacaagcccgtaccaataggtttgttcgcagctacctacatggacttgtgcccctcatttaagtggtgttcatttggagtcacgttacaccacttctcactttgccctgcgaaggctcagctcagtctctacaccccatctactgtcaccagtaatgtaggcacggtgttggcatatctttcgacttagctttcaccgttatgagaggggttttataacacccattttgttaaatgttatgaccaacttttacaatatcgggatttccaacaaactcttttataagttcatatatctctgctagttgcccgggaagccaagtaaaatctttatgctctagtggaattgtacaaccctgaccttctttccaactcaaggaaataactaagggtttggctcctttaaactctggccgtaatgtgttcgtctccaagtcccaagctacaattggtgctttagggatatcttctttaaaaatttcccgtacacgctcaatgctgtctacaaactcatagtctacaggagaggcttcaaaagcagcttcaccttgttcaatgaatttctgtagtgttataaagtcagcttcaattaaattccgaatgttaggctggactagcatatactcaatactatatgtaggtaacacccaaacttcatgacttccggatgaagaagaactttgcgcttgatctactgcatcctttagtctctggtagtcctttagcaacgcttgatccttttcaatacggtccatcggataaagctgcaaaaaggaatttagctgctcttctaaatgtttaacttcatcagaccttcccgcatcttcagggttaggttgattatttgaggttattgtaactttttgaggtactcctctttgttttgaaatagacgctactccaagaagcgccttacatcctaagttacctgtaggaataataatgtctggtttctcttttacgatcttgtcatacagtacctcaaattcaggtttagcttctttttgcgttggctgtttgtacttaattgccctgttaaacttatctcgcttaataactttaggaattaagccataagcatagtctacgtaataatcatttctggttaactttagaccgtcctcaattaatccctttaaaattttacctgcttctgtctgaaaaaagacattaacaaaactgtcatctttctttttcatgtggttttcacgaacatgttccaataaaaaaagtactttcaatatttattccccctctataatcttcactaggctgttgtctactaagtagctaacactttactcagaaacacgaaagatttctcctactttgtgctcttcaacccagtacccgaatggacggagcatcttaacccagacttggttatctgttggtccgctatccataaacacctcagtatccgctataacaacctcctcactactcatagaggatcaatgatgtctccaaaaacctctccaagggtatctttaataagctcttttgcctcttccaatgcttgctttcttgctttattttctcggtataattgagaataagcctcacggactcttgtagaatgctgttcatcacttctcaaatttacagatttagtgatatttgtattcaactctcttaggacgttgtcggttagacggatacgctcctgaataagaattagcagatcgctaactttctcttcaagtccttcgtcctttaccttgtaatcctttgtaacaatggcgtatgcaaggtcctctcgaggtatttgattgagataataagacccgtctacatgccaatcctcatagtctccatgatagagataaacatcttctagagccctatctgtagtgtcttttaaatccaaaaaatctctaagcgccttcgcctgttttgcagtcagaagaactgtcactttaaatcccctcctcttttccttggttataatcatactataacatactctgtatgtcaacacgaaaaaagaggagttttatgatcactcctctttttcctcactatgtactggaagttctatgtctgataatctagttagcatcttaaattttggaactttttttgctgggcgaataaaatattttttgtttagaccgtcaaatgctttcttttcaggcaattcttgaagtaagattttaaagagtttaccttgcttaacttcctccccattcattagagcttctaccacgatgtcttcatacagctccaatactctctctacatctccaatgttgtatcctcctctgtgagcaatgcgtctagcctgctctttacgatttactgtcaatatcataacctccctgagatgaggtcttactgccagccttcttgaaacgtttattatccctaataaccatagactctactcttttcatatctttcctagagtcacatactagccaaatattcattttccatgtggaaagcggctcttgaataaacctaaagcaatcgtacttatacttagattttaaatgatacataccgttataatacacatagtactttttgtgtcgtttttgaatttcatcttccctcagtgccgggaaagaaatctttactttatctacatggtaacgcaacgggtatagtgaaaacaggtaatcataagggttaatatccgggagaacaataggaacgtcaacagacacctgtgtagccttagatactagctgcacgttctttacatcctcaactgtatactccttcttacaattgtagacaacctctgactgaggtacactggctaacttactgatgattggcataggaactcgatccggcgtgtaataaaagatacggccaccatggtcaaatactttttcctgtacggtatcgtctgcgtacttgtgtttgtagagaagatacttcttactattccgtttattgaatcgagaggatgtctttttaagcgcatccatctccctctctacttccttttcgtttaactttgtaaccttaataaattcactttctttttgctttgtagttagattcaggttaaatacccgatctgtattatgtatattaagcgttcgttttctactcatctctttcctctccaaatattcatttatttttttttaactctatatctttattataacataaaataaaaaagtagaggcattaagaaacacctctacttagttaataaaatcctctatttccttagtttttaaaaagcggctgtaacggttttttaacttattagcaaatgcagctacctgtggtactgtggcttgagtgtattcgaagcttataacctctcctgtttgaatgtccactgtggcactaaacaccccatccggtgtagtaataataaaatttcctccatcaattgttaactctgttttcactaatcatcaacccctagtcttttaaactgtcaatcaagaaccatacccacttgtcttcgatgttaacaacactttattcttagcccttgtcatttcaacgtccacagactgacgcctccttcatatgcctccatagctcttcccctgaaggtctgtactttagttcatgagtctctgtatcaactaagaagaatacgctaaaaccattttgatccaacatcttgaatgagtggtgtctcggataagaaaaatcagtatcaatcgaatagcctgtataacctctaatttgaagattctttaaagtcaatgtcaaccaatcaggcaccataatcattctcctttatgattttattatagtttaaagtagataggtacacccctgccgagcaaactgcatatttcctgtattccctataaaatcctccatatcatccccatagtgcataagcattatccgccgttggactgtctcaggaataccttcaagcaactcttccaaactagcgtgaactcctcctgtgtataactggcaatcatggaaaatccgttcatacctgttagaggtagcaaacgctatcaaatccttgtcaaacaccgtatctgaagtgtagaatacctttcgctctcccctctcaccgagacctactgcataacttttcatgccttgaacatggttcgttttaatcaaatcaattgaactactgtcccctcgtcttatttgatccccccatgaaggatcaagcactaaacgaatattaaagtagtcagataaagataaatttttatcacccccatacttcaatcctccttttaaactctcttcccacaaggactctacgatttcttcatgaacaaataaatccatttttctgttattgaggacaaatttgttataaagggctgcttcctccaaacctccgatgtggtccgcatgagtatgagtaattaatataccgtcgattgactcccatggaatcctcttatctgcaagacctttaggtactgagtgtccacaatcaattaataagttgtatccgctgtagaaagtaaccaatgcactgttattataaaatctttttgagaacgctgatcctgttccgatcatggttatctccattaaatctcctcctgtattatataagatagttacagtctaccatactataccaaagtttgtcaacaaaaaaaaaggtgcaaaatgcacctttaaatcttgcttagcatgtcgctaatctcgtccggcttaaaccctacagacctttggacttccttaccgttgtcgtccagtagaataagaacagggacactcatgacaccgtactctgctgctacttccggattatcttctacgttaactttgtcataagaaacaccctcatcaaccaaaaagttctctacaagttcacagcctgtgcaattatgtttttcaagttttactagcttcatttagttttcctccccaaagtaaaagtcttcgtttttaagtggctcaactgtagccttcttgtatccatttcccttagtgctgaagaagtcatgcgatttcgtctttgtacttaaaccattcagtacaataggattaacttcttcctcatcaaagtaagtatcgaacccaaggttcataagtgctttatttgcgttgtatcgcacaaactttttaacatcatgagctaaaccaacttctgcatagacatcctcggtatattcaatttcattcttatacagcttctcaagaaggcttagagcaaacatctctaattgatgcttttctccttcgctctgcttattgtaaatctcctgagcaagcagccctacgtacactccatgaatagcttcgtctctaattatgagattgatgatctcgccagactgcattagtttaccttgtccgtagaagtacaatgggtagtagaatccgctgtagaataggaagctctcaaggaatacagaggctaccatagccttatacagcgaaatatcatcaccttttttaatatctttgtaaatggatacaatagtatctgcctttttctgaagatacttattttctttaacccactcaaatacttcattaatttgttctgtaggagcaagggtgaggaagatattactatacgatttagcatgaacagcgttctccatcatagccataaagtttaatacagccttccgttggtgtccttctacatgttcagctatattcggcatacctgtgttaccttgttcagtatctaaaagggttaaccctgcaagatttctcatatatgctctttgttctttatcccctagatgcttccacgtaagtaaatctccgtttaaagcaatctcttctggtaaccaaaattgcttgacattttgttcgtaaaacatctgtgtaaagttatcgtctggtttagaccagtttgctgcggtgtaaataaatttgtttgtcaatgcttattcctcctctttatccggtacagtataacagaggaagcatagtgccaacaaaggcactacactcccggtaaatcctattgcaaaagctactgaagaaagtaacgctattgtaactagggcttttattgtacgcttactcatattgcttcctcttagtgcctaaagcttggagtgctttactgtagtctccactagtttctttcatcattacttctttccacgcatctagggatacgatggtaaagtcacatctatctttgtcgtacatttcacaggtgacaacataatctacaaatagctctttcatataatcgagatcacctgtcccataaggcttaccgttaagaaaacatttatatagtttgctatcctccatacatgcctccttattctttatggagtcctctaactctcttctttaacaaccattatgttttggatagcctctcaagggcttcccagttattttttatagactcttttataagcgcctctcttttaagatcattttctttacgagtcttttcaacattggttatactacgcatgataagcagctctcttgtgtagtgtcttttgtacgagcataatacagagtcttaatacctttgtgatgtgcatataaatcaatccggttcaagtctctagttgtcatcgtgtcttttaagaacagtgtaaagctaataccttgatcgatatgctgctgaatagtggcgatcatgtctacaactttgaacatatccatgtcgtatgcttctttaaagaagaaccagttactttcggacagtcccggcatagggtagtatgttttactatttccgtatgtacgttcctcgattctttccataataggcattacagaagccgtactagactgtacataagaaatagaacctgtaggagcaatacaaagtcgatagctgtgatacaaaccactgttcataactcgatcttttaacttagcccaatcctcttttgtaggtaggtcaataccctcaaaaagagctttaaccttatcagacttaggtaggaagtcattgttaaggtatttatcaaagtactctccagaagcgtacgtagacccctcaaaacctgtatacgtccttcctctttccacagcaatttcatttgaacgggacaatgagtggaagttaacagcagcaaagaatacatcagcaaactcccgagctgtttcactctcataagcaataccgttctgagctaaatacccgtgtaggttcatagcccctagtccgattgattgcatttctttgtttcctttgttaacggctggagcatttttgatcgctgttgtttccgctacttttgttaaagaatctgtagcaagatcgacagctttcttaatagctttgttctccatcacatttaggatgttcaatgaaccaaggttacaagaaatatcaagaccaatatcatctggctctccgtaatcaccaaaagatgaaacctgagatgcttgaagtacttcagtacacaagttagagaacttaactttagagatatgattgttagcatgttcgttatttacattgtcttggaacatgatgtaagggtacccggactcataacgaagcattgccatcttttctaaaagcttacgagcgttcataggctctttccttacatctgggttatctacaagttcttcgtacatctcgttcatatccatctcatccatgtgctttccataggctttataaactgtgtgaggatagaataagtacacatctttatcttctctagcgagctcaataaacttatcagggatgactactccaatagacagagttttgactcgtacatcttcatctgcggatattttctttgtgtctaagaagtcgcttatatctctgtggaagatgttcaaataagccgctccagaaccttgtctttgcagactattcagacgtgttcgctacgcacgtcccgcctttcggccgcttcatgttaccatgaagattagactatatcttcatcccgaaggatgcctcccatttcgactaccaatcgcttgtagcctacgcctttcggctagtcgttgaacgttcctcaaataaaatgaggcttcgctgctgattgtcccgtagggagttcccagcaattaaagaggtttttcaatcgccattactgacgaaaggggccaactcaacccatctggtctgcataacggaaagcattatcgaacagcttcataacgcctacaacaccctttgtagcgttctctacgcctttaatggcctcacccttagcacgaatcttagaaaggtttaacgcaacccctccaccaagtttagagagctgcatggacatatctaatgctctagaaatgtcatttagagagtcattgacctccatcaagaagcagctaacgagctcacctctacgtttacgtccagcattaaggaatgtcggtgtacttggttggtattcttgattgatcattagttcaacaaactcttttgctttctttacgtccccgtctgcaaagaacagagctacaacagagattctatcttcatatcgctcaagaattttcttcttgtcgtttgttttcaacgcatagtcgttataaaatttaaatgcgctcatgaaagaagggaacctaaacttcttagcataagctgtttggaatacttctttaatctcttcaaatgagtactttgataaaaattcttcttcgtaatagtcattcttgattaaataatcaatcttttccttcaaactatggaagaaaactgtattctggttaacatagtcaataaaataacgatgaactgcttctttatctttttcgaactggaattttccgtctttctgtagcatgatctcattgtttagctgaatccagctaggaatattacttgtcaattttctctacctcctgcataaacctttctatatctgttggtgtaccgcttagttcaatcttgaggagtaagggtacattatataaacttgatagcttatcgcctgctgcgccgaagaactctccccagttccgatttccactcgacacaacgccttttaagtattttttattgttctctatgaacttagatgtctttggtggtacctgcccaaatcctacggtataagtgatatgtacaaacggttcgtttacctctaacccttcgtgtatctctttaacctctacgttatgcaatttttttagttttgtgacaaaccgcctaacattgcctgttagactttcgtatgtgattagcacttttgttcatcctccatgcaactaactcctctctatctttcgtagttaatttttaagctgttataaactcagtgtaacacataatatagtatttgtacagtctaaaaattcataaaaaccccctacatatagtgtttttataactatattgtaggggaaaaattttttatgtatttccgtaattatttatattcatctgcgtaagggtcccagtcctttacaagctccgaatattccctcatctgttgaggaggtattctcttgatattatccattgtggtaacaataacatcaaatttttgtacctcttctctaatgtttttaatagttacagtcgttctcatcacatcatgatggttaacgtctaagaggccataaaaagattctgcgtaaggaatcattacaaagtcctttgctctgtttctagaaaatattagcatagggacttttttaactcgtctagcatcattcactacttgagcccaccactcttttggttggctgatatctagtagaatgtggtccattgtccattcttcccgctttttacactcaataacaaaggggaaatctaaaccttgaggaggtacaatgtctcctgctactcgactatctgctccccagtttaatcctcctgaagcaggcacccggtggaagtctccccgccaccaaagggacatgagcttagcaattttaagctcatatgccgaacctttagtttttgactttttacccattactcctcctccttcattttttcctttgcttcttcctgtttctctttaacttcctcctgttctttcactttctcctcaatagcttgatagtactcagcttctgcctcattgaacattttatcagtggctcctagttttttaagaacagcttcttgaatcataagggtgtccaaaactttctccatcaggaagtcttgttgttgattaagtgctttaaaaagaagggtaacatcgctcatagttgcgacacgtcttgagagacgtttgatcttcttagcgtgttgagaatcctttacatcttgtaacacaacaaatctaaagtaatcttgtaagtcctgctttgagatagggtcttggcttttaatgtttgtcattttcatcttctccttttgtatcttcatttagtaaatcatcttcatgttcttcaaatttgattttaatagcgtttttagtatcttccggtagagcgttaataattgctctaattcgctcttcttgtagttcttgagaggctccaaccattccatctacaatctcttccactgcatttagatgatcctgaatcaaagctataagtccaactcctacttcagatagggttacatactcattagaagcatctttaattacactctctaactcttctgttttaccttctgcctgaagaaagacgaccttctccataaagttccaaagtgtattcttattttcactcatgggtatcatccttcaaggtattaccagaacttccaaaccctctttcttgccgtactgactcaggtagaacgcctgtctctttaaactctgccacaatcttaggaatgaacgacatctgtgctactctgtcatgctttgctatgtatacagttcctctaggtacaagggttctataagctgcttcatttacagccttagcttctttagaagtaggttctgcgtacccgagtaattcggtttctgcatcataaaaccgcctagcctcttgtaaaaccttttgaggtactttactaataggtagccgctctcctttagttgtaataacaaagtctactagactgttatcaataaatgtgttacgcaggagaataccaataccatcacgatatgtgccttctacgatacccggagagttagaaacaatcaaaggtgttttactagcgcatccactacgaagggaaataaacattcctgcttcgatcgggtcaaatgcagtttttaaattcgtaggaacaggcacagacctaaaagtcagtggaggtactaacctgccctcggaggcgtacatgtcgaatgcaaagtccccttcataaccttgggtaggcttcactgctcctttttctttcttatacagcacttcaagctttttcaaaaatttttcctccttatgttataacttaattatatcatatagtgtaccacacttgtgttacagagtcaactcttttatactgagttcattaatgttaatcgaagctccccttgactatcagccgggaaagcgtttctcagcagttcctgacacttttcaaaccctaaatcgttggcatcttcatctagaccgctatagacaaagtacacttccctgtccggttccatctgctttatcatacgtgcagaatcgatcatatccttccaagcatctgtatcaagaaaaatatatataggtaattttctttcccgggtctctcttagtaaaagttcaacctgaccctctgtaatcatcttaccaaatgtggcgacacctgaatccggggtcataaaactgttaaacaccccttcatgaatgatgatcttatctgtgtgttttgcgttgtttaagttaaagatcgtgttcttcttagaatattctccttctcgactaggagcgttgaacgacttaatgaaagggttaagttcaatactacgagtattccagtaaacaggcttccctgtactatcatgagtaaagaagactacgtgattggaaagtctgagtgtttttccatttataagtgatacctctccatctgtcacatacgaaatgttgtgtcgctttatattgtccagcgtaactcctcgtctatgtaaataagtgaagaaaggaaatgcttctgggttgttaaagttagccataagaggcttacagttggtagggggaggaggacatactaacttcccctccttatcctcctctaacggtcttccttctctactgatgaatagtagcagttgttcttccttagttagtccagacccaaactgttcagtattaaaccccctctctttctctgagtaggcgtcatagtcgaatgtggctagaatgtccgctgcttctggaaagggcacattgtagtactcctttacaaaagaaacagggtttcctttctctttacatctatgacacgtccataagcctttttcttcatgtacatagaatctgtatttagtttccccacaaaacggacaacaaaatcttatctcgcctgctgctgtcttgtactcccctaattcctgttgtaataaatccagaaacatagtctaacctcctatcttatatcgctcttctttttgcaatcttgttcattgtaactaacatactatacatttccccaaactcaaggtacgctttctcatgaattgtagacatgctttcaaacatcttacgctcccactcttcgtctaactcggttacaggagcattagttacttcttggtgcatcttgtagttcttctcgatatctttttttacaagactcattaagtactgtagccgcaagaacccttttgcaatatctctgctgttgtatgtatcatcagtaattacaggtaaatttagttgcttagccttttcaattatgtatgtatttctttcgtatactttctgattaaggaagaaaccatctttctttttcaacggttcagcttctttaatagtacttggagcgttataaaaattagggcccttataccctcgctccttaaccagaactaatcctcccttagaatctgaaaacttgtatgaaaaattaatgttgaaagggtaccagtaatgtagattctctaaaggcatggctacaaatgtctcccccgttcgattcacgctaacccgcagaataacgtcatccccggcgcccctttcatgttgtgtttttactaatagtttcatttctctactcctccgcttattgtggatactccatctttatttttagttactgttactgttttatcaaatagtggttttaaatgttcactatgggaaataacaaatattgtccctacagtgttaagtctttctttaagaagtgttactacgttttcactacctacactgtctaacgcatcgaatacttcatcgtatactacaaagttcgtagttgactctgatcgactcattacgaggtcctgaagggctaaagacactgctaagtctaccctcttcttctctccctctgaatttgctctgtagctttctcctccggaatggttgatcaactgaagatcaaatttatccgataaggacccgtctttattttttgtttgtgtactaaacttaatctccatgtctgatccagatagagcggacaagtatttgtttgctctctcgtttaggaatggtgttactaagtccagaacatgagattttacaccagagtttgaaaacactttaacgacatcttccagccgggtcttttctttctccagattcaaaagttcctgcttatgactttttattttccctctaatggcttctctctcctcatcccttgattttggttgaggaatgcttctgagcttctgaagagtggttttcaagttgtctagctgattcctgtaagaagccattgtattttcatagttagtgatctgctgctggcagttattaatctcatccataatctttttgtactcttgattatgtgtgtcataaaccgcttttacttgctggtactcttgaactgctacagtatattgatctttaagacttgtaatctcttggtcaattttattaaactcgatgagcacgcctttcaattgctcccttatggacagtagctctttttctctatgagcgttgtctaactcatttccacagacaggacaatgggtgtccttttctactttcttatactgactaaccagttcagtctttttactgttatatgtatttaactgcgcctgcttattttgcagtatctggttaatttcgtttaccttacttagttcctgatcaattgagacatttgtgtgcttatctcgttgactttctagcagcttaattctttcccgaataccttcgacaatcgggaagttagctgcggcgtatctttccgatgtcacgagcaagtcatcaaaccgtttctcttcctgtttaataaggtttaatgtgttttcatagttgtctctatcttgctgctccagagtatctacctgagaaagttcccactgtaatctttcaccttcggcttttttatttcggatttcttcatctttagctctgactcgttccttagcaacttcttgagctgtaacgtatacctgaaggttgactaagttctctaaaatttctttcttttctttatctgtggcaattgcaaaccttccagctccattaccttgggaaaacattatgctgttaatgaacgtgttgtagtcaatacctacaattctttcaatggccttatttgtttctgcggtagatttttctgtgatctcttgaccgttgacaaagagaagtactttgttcttatgtttactatgcttcctatatctctcgattcgataaaggtcttctcctctgtaaccttcaaggattaccgctgtattctttcctgctgttcggttgattacatcgttagctttaatccctttggatgttgtgtcgtagatagcatacactaaagcttccagcaaagaactcttccctgatccattactttggaacttgctgtttgtttcgttcttcccctcaatgagaatgatgcccctattatcgagctctatttcggcctctttaaaagagaggaagttctgaatggttagttttgtccatctcatttaggattattaacctccttataaaagtgtatatctttcctgtaatcacagtataacagagtctgtatctattgtcaacagcaaaaaaggctatccagtaaatgaatagcctcggtgattacgcttgtattcctctagcttcccttaacacgtctagtgcaatgtctgtaacattaggatagaactcttttgtatacgactccacaatctgttcttctgaggattccatagatatgtcaatacgtgtttcaacttgaaaagtcttctggacttctactcgaacgttgtcgctctcttctttaaatatctctacctcttgtgctttttctttagggagaataaatcttacatagttgttatctacgatttcttgtgtattctcatcgatatcagttagtgtaataaactttttatttggaataggtataaactcaggtttgcctcccttctcaaagtcgatcaagaatacacctttatcttgaccttcatcagagaagctggtttgaattgtgttccctgtgtagaagacgttatctgtacctccaaggaactgtctcttatgatagtgccccaacgctacatagtcgaatacatcagggtacaagtcacctagcttaaaagcgccttccaatctgtgactgtatcttcctgtttcactgccgtctacaccaatatgtccggctaagagcgtaggttcatccctgtctttagcatcctctgcaaactctgcaatcctttttttcagaaattcaacgtcatccgagtatgggacagtgtaaaggaaaaatgtttcaaaatagtagtcatccgcctgcgggcagacacatgtaatttctggtgtagaactaactttaacatgtggcaggtactcaaaagtttccagccagtgattagggtttgtcgtgttatttttcgaatcatgattacctctaactaaataagtagggacatcgctattttgtgcaaagaccctataaacattattaaacacaacatcctctagtgtacttcgtttatggaataagtcccccccgaaaataaggggagctttatgttgtcttgcaatatcaaatactttatgtaatgtctcaatctgagctctaaacctatcgttcacaaattcaggatcgggcttagcaaaatcatcgaaaatatggcagtgcatgtcagtaaagtgtactgctttacagttataaaactcctccattaaatctcctcctattgccgtgagcttcgtaaagtgttgttaatcatatctgtatagtttggtgcttgtgcattactctgtttctccttacgtttacccttgaaggcttgttccatacggttgtctacctcttctaagatcgcttggtgctccttaatctctgcgtctgatctgtagtccctaacagactgagcacttccaataaccttaaaccctaacatcttatcgtaaggaccttctggagggttacgaaccttatcagcgtatagtcttacaaacccggctttatattcttcttctgtagagtttacagttagaacaagctctgctgcgttcttcttacggtgtgacccttccatatgctctgctgttctgatctgagcactataagcggtacggttcatctgagatgctgtccacatgactacgttatagtcttgagcgattcggcgcatttcttcgaatagttttcctccgtcttctgcttcatttccagaagcgtgaggatttctaagcaattctggatagtcaacgataactacatcaatgtcaaccccttgtcgaagttttacatccgagataagctgttcaattttagtcggagtgatcgtccgaggagagtacctagcaaagaataagttacctagtttatcccgggcgttcttgtacacttcctgatacttgttgaagttctcttcattcagcccatcacctgtcaaaatctcgctccggtttcgacatagcattgattgttcaaacttcagaatcattcgattttctaattcctcaagagcgataaacagaacattggctttcatctttgtatagttagtcgctaagttagtcagccataatgttttacctgtaccagaggaagcgacaatcatacctaactcacctttagctagccctccactgtttaattggtcgattgctttaaatcctgtaggtattgtattttgattcaacgtagctaaaacttttcttttatactctgcgtcatcaataacattaatgatctcctgctgtttaccgctaatgtccatgagttgaatgcggctccactcctcatccagactttccatcatggattcgttatcaaggtttgtagcagctttcttcagcagttccatacgcatgtacttacgaatatgcttctctatcttttcatcgattacattgttatcgctgctatccctaacttcatacagatcgtttactgcattaaagtatttctgttgtgtttctgcgtccttccgcagtttagttagcttctcttcgacaagaactaatagcgcttcctcagttagctgcttcctgtttgctttgtagtatcttgaaataattaaggaaagctccttgtacacctcattaccttcaaaaacatctaaaggtgtaatagggagaacctccttagaaaaaacaggagattcaatggcttttcttagaatctgttttgtaatagggctagttgacaagtgtatcatcctccttaaaaaattcatcgactgcttctgctaaaaagtccccttctgataagtccgtagtcagttcccactcccgctttacagcaatgttatcgtagttaacaatactgtcttcatcgatatattctccgttatccatgaacttgacaatctgatcgatgtccaatacagagtagtcatctactgggattttttctttaccgtactcacggaacgcctcattcagatcagatagagatagatgaagattcttacggtccataattagctcaagtactttaggtgtctcatctaacacgctatactgataagcatatgtctttccgctattcatctgctctttttgatctgttgttgggtgtaacaacattcctaaagctttagcctgtaaatctcgggcttgctctttagtctgtgccatcttacgaaccgaagctaatacaacctgagtatgttctaacccgagaataaagtagcttggcaatcgggttgctcctccggatagaatcatagattgaaggagtacgaactttttaattgtatctctggttttcagagatactttttcgttcagaaggttctcttctgtcagtcgatagaagtcaataagggcttcttccttatcagtaacaccgacacctgttaagaaatcatcaatagaatgtctaaaatgaagcaatcctgttccaacttcagccgtttcataagcttcgataatagctctgactacaaagtcatctgcaaattgagctggaatttgttggtatgttacgtatgtaacactgtttcttttttggtagtcacagtactgcttataaacgtcataagacgtgtctccaataagagcattaacaaacggaagaaccttcttactgttatttagtgctccattgtataccgaacgggagaattgtgcagataagtaaatgtcagcttgtataccattctcctcacagaactgtcgaaacttctcaaactgcttccatcgagaggaaccaaagaactcttcaggaagaacatcgtagctgttgcttactacaggtactttattaccttccccataaacatctacttcagcattatgtctatctgtaaatagagcggcatatcgattatacaaccgtgaaagcaaatatgtacgatagttgccaactgggtcgtctgtctttttaaaccaatcccaagttggcactcctcctagctctttaagctccttattaagcttatcgagttcttcctgttctttgcttcttaggatttttgcctctatcatttgctgttttgttcttctgttacgtgttttcttcttcggttctttctcttttttaggcatctttttctcaacaatgtcatcaatactgataggctcatctgagttaatgaatgccttgtctgaggtatcaaagcggatcatctttgtattaaatacaatgactgtccctcctgctctacctctaaccccttttgtctgaataatgtccttctcttctaactcacttaaatatctggaaaccgttctagtgtctttgcctgcaagttccgctagttcttttttcttaaaggcgatggagaagtctttgatttccttagccttctccacgatcttagttaaaaaatctaaaactctaggctttaaatcgacaatagaggattccaaatacacaccgtattccatatatccgttcctcctgtctcagttttttatattcacattataacatactctgtgtgatatgcaatacctaaatttgttacagaattatttacccaccactttaacatcgaagttttcttctttgaaaatcttaatccgctcattagaatgtcgcagaagaaacgaattcgtctgatcataaaaatcaaagaccataacgctgttaccatcaataccattcaaacggagaccccgaccaatacgctgtaattgctgacgcatagattttccgcctgctgctaaaatcatacagccaatacttttcatatccactccctcgtcaataattgtagatgcaactaaaattttaagatcacctttagagaatctttcgagctgcctactacgatggtctgcatctgagccgccgtgaataaattcaacttctatacccctttctctcaaagaggataaaattcgatctccatgatcaatctctttgacactaattaaaatgcctcccggtcgtttcttccggtaaccttcagctagatcaacaatcactttgtttcggagttcgttctctacaattcctcgtttatatgcttcaagatatgtaccaactagctctatatctcgtggttcttgaataggtaatagtctgatcgtaggttttgaagaaattcctttatcaataaggaactcattcgatactctaaccacaacctgattaaagattgcttgtaggcgctgccaacccatcttatctttcttatcaaccgtacctgtaagacctactctgtaagtagcgttgttacaaagagatagagaagaaaaccatgtttctgcttttgaatggtgcacctcatcagcaatcatgactttaacggactcgataaattccatggtatccttgtactttttatacttgttcttattcttcttctccataattttatcaaactcaacgacatatttattcagctgcatttgtgcgcttttatctgtaaacttattatcatacgctatgtacatcaactgctcttctgcggatttccaaatctgagttgttagcttacagttttttatataatttcgaagaagttgtctagtattttttgtgtttctaaacttaggagtaatctcctctgcaataaatttaatgactctctctttttgagtgaacttgatcccttttttagggtcctttagtgcactaactaatgtcggtaccattacaaatacgatctttttatttttaatatcgaacttcccgtctccaattttaccgatctctctaggtttcaagttcaatcgttttccaatacgttctgctgactgatgaaaaatctccttagagtgagtgaagaaagcaattctttcccctcgtttcaggtatggtaagacttgctgcatgaaccctgaagcgatttccgtattatgattaataatgccgtctgaaataaagctatgagtttccggcatgtgaacatcgaatgtaggtacttcccctatatccttaacctcaactacctcctcgtacacatagtgatcagaggttagttcatttaaaacggcaagcatgtctcgatcaccgttgggaaactcttcgataagagaacgtagacgagacttagagatgctactagggattgtaaacttcttacgaaacccttttggtacatcttcttttctgtagctttcccgatatgattcagctagtgcttttccgaatggaactgcttctttcttgttgtttcgcttacgttgagaaaccgcctcgtaatagtcttctaactgttttttgcgcttatcggatatgaaagttaactcctcaagaagagcgattgaatctgttgaccctaacgctagtacataataatcgttagactcataacctttaacgacttttttacgcacagtaggtacaaaccccatgttacgaagcattaagttaacctgatttattagagtgtaggaagcactagtaacatcaatacagcctttttgcttattaatgctgcactcggattctaaatatccggacagaaaagctaactgaatatgcttaggagattctagaatgcactgcggcacacatttatccttagcaacaccgtaagcaatatcgaatttttcgtgccacgctactacagcttttttatcgtgtaatcggaactggtcggctgtagtttgcgtcttttctgtataaagattatagttaggcttatctgttaagcctagaaggtacttacgtagtcgagctgatatctcaggtttatttgttgtaaactcgataaggtgatctctacctatatacccttcagctatgatagctcctaaggcatacgcctcttcttcggactgtactaagctatttgacccataaacattgtcacctactcgacctacaaggtaatcaccaactttaatgtcttgactcttcttccaaacaaaagtaccgtctgtatcaacaaccagtaatgggtggtttaatgtaactacattctttgttcctcggtgtcctcttatctctctaacttttcgagtcccgttaaatgttaaatgagtaggtttctcaaacttaccataacgatttactagtgcaatatctcccgtgtatggtactactttctcccctctatcgtttgtatcttcgcctgcttgaaggaaaaactctctaagtgtcattacacctttagaagttatgaggttggaataatctaccaaacacttacctccgttagttgcgacatttacaatccctacctgttctctaaaaactgctttaacagaatcatactgatagtctctgagagtaataggttcttcatctccgttacctaatacaatcttttcgtcaatactatcagggtgaactacagcagacggtctgacatcttcaatctcgtatttgatatttgggtctttttccataagttttcttagtccctcaaggaactgagaaagcaaacctgtatggaacttattttctttcatgtcataaaaatccgaaataccatcccaaaccccatttcgatatgcaggggaatattgagctccatcaacttttacacctagttcatggtgtgccatatattgaactttttctttgagaagtgtattcccttcaaagtccactgttgtgtacatcgtgtccacaataatcttcattctctgtattctcctcctatatgtaaagtaactacctctctattgtaccacaaaaatacagtcttgacaagagtgtgtcttatttttggtttaaacactctgtatttattatatagtatatattattaattatatttataaatataaatacagaggagttataattgaaaaagagacaataaagtatggaaagtatgtcagaaatgtttatctatcagtatttaaaaataagacaaaaaaaaagacaccttattaggtgcctgatcctccttcaagagcagctactctttgctctaagtcttgaagttgtcctgatagagtatctacagttgtctgatctgctttgtctgtctgaagggaacttactgtgttagaaagagtatttacagtagatttgtcagctttgtttcctacagcagtttcaagattcgtaaccttagtatctaaggcggttactgtagaactgtcagctttcttacttacatctgtctgaagagttgatattgtattggataaagtacttacagtagacttgtcagctttgtttcctacattcgtctctattgtattaactttagtcgatagagcggatactgtagagctgtcagcttttgttgctaatgcactttcaatatcagtaacacttttctcgattgagtttactttgtttacaagcccttcaaggtctccaatgtcaccgatctgctctttaagctgtttgtcaatctgtacgagtcttgctgcaagtgtctctattgcgttaggaaggttatggtacatactatcccgttccatactattcatcagtcatacctccgctcttattccttatcttttaaagaattcattatattctgtagttcttgtttcattttttcaacttcctctaaactttgggtaagctgccgctgatctctgatcagcgaccgctccctagttgttggaataaacagccgtgctttagaagctggatcacgtctctctgctggcatgttcatcctcctccttaaatgtcgtctttaaatactcccgtaaaccgtcttacacgaggtctaacaaatcggttgtcagctcggagttccagtttaaatttcaaggattttgcaagatcgtttgctcgagctacgtttgttgcagtaaattcatatcgactaaactcagcagattgaggagtaatcttagggttttttaactcaacccagttctttccttcatctagagaatagaatggtgtaactttcgttcccggagggattgcagcatcataagatactttcaagtctttaaatggtgcgtctgttgcatcgattgttacggatacataatctcctgcggtttcagaaatgaagtttacaaacagtaagtcttcaagtgtcaacatcggagagatataccgattagacttaaatgttgcccgcagcttaactacaccaataaccattggattgataatcttctcaatgtagttagaaagaggctgccaaggtacatcgtcaatcgagatcgttccaacatctgctttatcgatcgccttaacttcccaagtacatcctgtattggatggtgtcaggtaagaggccatcaatagaatcatgtctgaatcaaggtcttcgataggatcaaattcaacaacagcgttctcttggaagtaagccgtgtaaacgttgaatttaaggtcagagctttggtgtactgtccacgtacgtgcgtttgatgaactaaacagtacgccttgtacatatgggttagatacaaccttagcagacggatcatctactcggttttgtcccagagtagccaaccacattgtgtactcattactgtctgtgataataacgatacagtaactttggcctgctttacacattaacggatcatctagagcaaccttcgtagctttagaagcgtcgtcagacacttggacttcagcaggtgtcaggattctttcagcatatactgtttggttaggccatcctccgtcagacatgccacgtacttgaacgatcaagttatctgtggtagacttagaagcgaagaataggtcaaaacttgttactacccgatcttgcgggaatacgaatgattgagctaatgggtcgtataagttaactgtaacccgagtacgagtaacgacttcttcagttgttttcagcgttccttgagctacgtatgtagtaaaggcgttgtttgttgagttctggagaacgacttcacgtacgccagtacgtacacccgcagggattgtgaatttacctgtggcttttccgctagcatctgctcgaatagttccagtgtcggaacctgctactgtacttccagtaggtgtcaccgggacacggattccgtcaaatgtcaagtaaaggttattagccatcggctgaaggttctcagcaacgaagttaatgtctctttgacggatgaactcgatagccgattcacggatagaagaagatacgttagtcagagtacctgtacgccctagtagcttatcttgagcaagggagttacccatatcccatttttggtttccgtccaagacaaggttatctactagatactggaggtctttgtgtttagttgtggtacggccgtgcctccaccatctatccattcggactgtttgggtttcttctttgttaacaacaaccttagtttcttcgatccagttgtcagcagacggatcaagtttaatagttccaagtttgttatatactgcgtaagggttaacattcattgcttctgttgcaaacggctgagaaatctcttttgtttccgtatatggtgcagttacaatccgtccccacattgcagcaatagatttatctttagagaactccggaaccttttgttgatctgacggagcattaacctgtaaggtaatacttgcgtcctcaaagctcacagcaacagatgattggttcaagtccatacgagtgaaatcaacgaatccatctgcaaacaccccacgtagagttagcggatcatctacagcgatagatgagtcttccaaagccataatcgattggttgtattctacgttttctagacgtgttttcagtttctgaagatcagacatccgtaaacgaacaacacctgtattagttgcttccgcgatgtcagagttaggatatacgaatacagtaccaatgatcagagttaacgggtcagactgatctggtacttccgcaacctctgcacggtctggctgcccttcgattactgtgaaagcgcctttgttatttaaagtaacaaggtctactcgtgctaggtagaaatcataagtaatcctaacgactccaccatttttaggtttatgtccagtcataccgttgaagtctacataagtatcccatccggcagtgccttcaattggagtcattgtgactttgtagtctacgttatcctgcatgactcgatcatattcgaaagatagttggtatgactgacctgtgttaggctcagtaccgttcatacctgtattccagtctacgtattggataccgttctcttgaacgattttgtagtctgttccgtaggtgtagatatactccgggttggtggtccaaagacgagtagtagttggatcaatgctagtatactccgctgggatagggtctctaccatctcgaacacctttagacactgtaataccgcctacaggactctcagtacgagcgactacacggttaacggattttacagagctacttccaactttaatcttacgaacagcagtatcatatgtatgtgtttcttggataacttctctgtatgtgagagacttattcaacgggatacgagttgcagtcggtttgtggatacgataacctagcacataagctgtgccgccatcaatgacgagatcaactttaccttctgtctcactcggctctgtccacattgcaaaaccttctacttggtaagaaccggattcctcgtaagtccgttgggctaaggtctcattaatcaaagagaactcaggacgatctggttcgacaaagaggttcccgtcattaaactcgtaaatcgttggagcttcttcatcattgtttgtcaagataactgtttcttctaggcggtcagctcccggagagttgtaacttggaactccttgagttgggtccaacaaagaagggtcttcattataatcaataatacgttgttgtagctttactccgattttttcattccctactccggagaaagggattgtttgtttatcaaagttacggactttacctgctaagtatacttcaccgtcttcaacagtgattgtctttttctcagagtcgatagagaaagacatcccgttctgaagggctccgtcttcaaaaatactgtcaccaagttgttgtgtattgtactcagcgatagactgaagttcaattagctctgagttttgaagaggtctgtcaggttggaaaagaactttagttctgtttttcttagggtcaaagcggtcattataaggtgactgtcccaaattgatatctgccaaagttattcactcctttaaattaaacttctaccataaattgttcttgaacggtaacactggatgttctattttgtggctccctattttcatagaaacgcaggattcccgggtctttaacttctgaagggaggaggttttgtttagttactccatcgttaggtacgagatttacatgaatacctacttgcctatatgggcctagaggcagctcatctggtttaatctcggcttcaatgtacacatagtaagctttttcttcataggctttatctacagggattaacacccattccttatctccatagctaactacaggatatggtgcgttatctgctgtctctgtagagcttagcggcctagccaaagaaaactgttttactttcttatacccgataacttcagaaatctctgtagcattcgggtcttcgtctggtgggttattatcgtctgtccaaggagttgttttaccaataacaaggtaagcgctactccactgagactgtagctgaatagcatcataaatatttgaatacaacgttgcaattgccattgtttagttttcaccctctcgtctgtcattcgttaacacgtctattactaatatagcagtattttgttccataatattattataccacatattaaaaaggagccgccttttgcgactccttagttagtatttaagaagcaggttctgttttagtcttaatgtaactcattggagactctccgagactgttaactgctgtaacattgattgacaggttcgtgtccgctgaaatgttctctactaagcagctaggttctgtaacttctttgtagaatactttctcagctcctctgtaaactttataagaggtagcgtccggtactgcgtcccacgtcactgttgtagagttcgtggtgctagtaaactgaagattctgaggtgcagcaggtgtcctgtctcctaagaagtaaacactgaagctgcttccagcccctacgcctatactctcagtcagcgggtttatttgaggataaataacgtcccctttgctgaaactatggacaaaggaagcttttagtatcggacgtaagttagcattagagtaaaggacatcttgcatgtctacgtccgtagtatcatttagcttaacaccaaaacgaacatatccaatcgtctcagccaagtcagccgtcagcttaattgttaggtctacaacatacacgcctgatctcggaatagtaaaggactgttcagttacgcttcctgctggatatgaagatacaacagtatccaaggccgttagctttgtataatttcctgatacaatgtcctgagtagcggtaacactgttaagaataacgtggttactgaagtttccttggttgtacacctctttaccttcaacttgcaacagcggggaagaaacattaaccttatcttttcctttgatctctgttggtgcggtgtcgttaccaaaagttgttgcttcactagatgttccgactactccttgtagtttggaaacgtctgtctttagcttccctgtatctgttttcaaagtccctgtatcagttttaagagttgatatatcagactttgctgtattcatgtctgtatgaagagtagacacttccccttttacagtagtcatatctccatccagtgtctgaatctcagacttaacatcttgcatgtctgcatccagtgtttggatgtttgcttgagcagttcccatatctttctgcaagtttgttacattagtttttaccccattaacatctgcttgggttgtttgtagattttcttttacagtagatacttctgtttctacagatgcaacgtcccctttaatatcttctaaagatttattgtctgcaaactggacgttaccatccgaagcacctacaaagaattttttagtatccgtggtgaaggcaggttcccctacatctagcgaagggatgtctgcctcaactccttgtcttaactttatctttgcacgctggatttccgccatgataccaacctccgttgtattagtttgattgaattatagaatgtctatttgtgactgttttcttgagattaattgtaggccggatagcaacctctgtattaaacccaagttcaaagaagtcgatctgtaaatcaaacatttctcctgaaacgtttccatctagttctttatcgtaagagatacctgtaaaacttcctccgttgatctctaaatcatagtcgttctggtcgaatgatccgccttcaacaacaggtcctcgactataaggaatttctaatcgagtaaatacgataccctcgtcagacacatagttcttcatagagtctatttttacgttaccttcaactccagaaacactcaccatacctgattctagactgtcccacgaacctgtgtttagattcaatatttgaacgatgtatccagatggcttggagactgacaagagagcactcatgctgtactgaatatatggttttttcattaatgatacgtatgtatcttttgtatagattccgtccggttgaacttctcgtaaatacttactgtagttcaatctgaagtacgtagcaatgtctagcgtaaagtacaggtagtctgatcgagatgcgtccatagactgaatggcatactgtccgtcaatcgctcctgttcttgtatagaagtctggagatacagcttctgttttacttagcacatcgggaacctttgtcttattatcaaagactaagttgtgtgctgagtatgatgctagattgtatgacgggttagaagcagagaacgatccggccaaccgatctaaagagttcaagtcactgttgttagtatggaatattccgctttcatcttcctcagttcttgatctcgctgtaagatttacgtgccctctaatccgatcaattaatccgttccaaatagatagcttcgtatagtttgttacgatgtcatcaccaagaacgataattggtgcatctggattattatatcccggtctatacgtgagcaggacagtaactccggcaggtttaaactcgttgattatatccatgatgtctggaggaaacggcttggaaaacttaatgtcaataacagcggtagtgtaatacttaccttggatgtggtctactccgtccagcttcgatttattcaaatagaagatgttcgtataaggttcgtaaatttctatgtatgacacgtagtcattaaggaactcccggatcgcatcaagaagagcaggtattgttcctctttttaacagtacataatttataatgcgctgcctgtaaacgtcatcctcctctttgtcacgccggactactccaaatagtgatccgtacctatctaaccattctccggttgctgtgtctaaagacagcattagtttactttggatagtagcttcctctgtgtttgttaattctatgtctattgctgataagatcgcagcgtttgcttttgtcttatcttcaagattcgttttccatgcaggcagcaagtgctttaaaaaagacatgaagccttaacctcccttctacttcagagttactgtcacattacctgctctaataacttcagaaccctttaaagtgacattccctgtaggctccttaaaggagacatcataaattagttgtctatcgatatacttaatcacactcattaaatcagacagaactaaactctgagatgtctgcatattattcaggtatctgacaatttccattttaatcttgtcacggaacgtatctgtaatcgaaaccttatttgtcaaagttacaactacatcaacatcaattgattttcttgttacagggaaaacccttaccggaatgcctgctggtctatagtagtaaagaacttcctcgatcttctctttaacatgatcaggcaagtttccgtttctgtcatgtgcataaacgtttactcgtccagtttcttcatgaatgaatactccagatacctctggaactgttctggtcccataatcaattgctggaacagtagctcgacttaaagatttaatgaaggattggaaacgagaacgcatttcttcaattggctccgcatcttgccctgtttgaaacgcttgtgggtttgttactgctcttatgtttgcaatcggactttggatgatgtcaattacatctgcgggaatgttgcctgttgatcccggagaagtacagtatacttctacttctgctacaagtgatcctttagggatatagtagtctatgagtgtttcatatacctgaggatactccgaaattcctgaagagaatcgtgaacctctggaaataaccatgtcagaggatgcaggactatgtagaaaaatttgtacaaccccgtatgcacgtattgcaggttttcgggtaaatccgaatgagctgtagacaccttgctcaatagcttccatcatgttttctcttgtaagaatgtaatactgttcaagctctatagagatagcttcatatagggctctcatggcgcttcctacagagaaatcgttaatctctcttgtgtttgtaattgtgtggtcaactaaccgagaataaatctcggacatacgtttaaatttcatgattaccctcccctcatatcattgagtcattaaagttatcaagtaaaacgattggtccgtcttgctgtgcagcaataacaaactcaaaagcctcttctagtgtgatacttgatacagtgaacgaagtcttaaatgtatttccgctgattacatggccgttatggttaactgatacaactcgggcgtctgttctaagcgttctttcgatctctaggttaataagagcagcagtctcttcattgtttttcatccctacataagtattcaggtctgatccatattctgggtgacctacgtaacttcctctgggagtaatgagcctcacaaataaagactgctttaagttctcaatacctcgtacagtagcgatagctccacgaccatcccctttcatctccaatatctgagaatcccatcccggggaaccaaatcctcttggaagaggcaggatatctaaatccttaccgagtgcaagagcgtagatttcttcttggtcgtattccggcatacgctttagttcattgatcaactcagactgaatgtcgtctgaaatacgtaccagcaatgtgtctcctattgtaacgaggtggtctgggttcttcatcttctcttctacggtgtctacaatgtagggatactttaagttattaaactccgctaagctcacccactgagacatatcacccatcttttgttgggcgatagactgcatagtatccccgtatgatacgatgtgttttatgaatcttaccaactatcttccacctctttctaccataatgacatcgatctggttctcgatataaccgaaagaaatattcatttctctcatattctcgatcatgtgataatatttaggatcagtactaaagaagtccgcaataaagtttgtgtttgtctttattgtacgaatgtctctggttgatacatactgtaaattctttggtgagttttcaatgttgtacagcaaagagaatgactctaacacaacagccttcagcaataagtagatatccggggaaaaggaggataggttactattaagagccttcatgacgattgtgtttgaatccaaggcatcattcgttacttctattgtaccattatttagctcgttctgtgtgattctggatagcaccgttaacgcatatgtaggtttgtacagtttagattcaaatgcgtcatcatctgttatgttgttaagcgggattgttccgtcgttaagtacaggtatacctgaaatgaatctaattaagtcagacgagaaagccatgttccaccctcccttaaataatatccaatgttgtatcctagaccggacataccgtagttgtatgcagtaggagatggagcttgaggatttattggttcggttgcctctgggggcggtgtatacacatcagtatttcctttattgtagatatccggattacctgaagaaggatcgtacgggtctggttctggcttctctcctgttcccgtgtcaggacgattcttactcggatcagggagagaagggaacctgtttccaatttcagggtctacaatatcatcatcagaaggttcactagccttccgcagcaccaccatcttaatttcgtacctatgggttagcggggagttaacatcctgtgtatatgtgacaccctctgtggacaagtgaacgacataactctcatcgtttgtgaagtcatggaaataaaaatcctgtgctgctttactcccgttaccacccatgttagcgtagtcctcaagaaatttcttcatctctttgattttattgatacctctatcttgtttacgtccagtagggttaaaccctgttgtaccactaatagtgatagttggcacatctgcctgaaagtcctcgataacgattctgcttttggttttaacagccgttgtacggtgtggtctagcaaatgtgtagttttccggatttatcgcaaatctaaagaatctgttaccaaactgaaaagcaatttttctcagtctatttttaccatctgccattggcatagcttctcacctctctttaataatataagaaaagacagggatttcacctgtctttacactactcttcggagatcgtatttgtccagtaattcttgtggtgttaaacctcccatgtccttttgatcttttctcggaatacctgcttcgataaacgctctatcaataacttcagaacatatgtatctatttactttgttaaatactgttgtacgaatatcgaatactacacgtagtaacaaacctataatatgtaagtaatcataccttgcaccttccataagtacagcagcattgacaatctttacacggtcttctggagatatgttatttaacctgtatacactatgtacattttctgtgtaatgtaaatccgctattctggttttaataaacctgttggcctctatgatttttgtagggcttatcgcaagggatacatggctgtattctgatctagttagcttacaaataacgttcccgataaatcctgtaggccgatagaaaataacatctccgggttttatatctaccattatttcagccccttacatgaataagtctgctaggtggttaaacctagcagctttttaatacagtcattcaggattaatcggtgtttctccgtctcccgggttttccgatggtggctcctctggagagggttctacaggtgtctcttcttctggtttgtcaggttctggctcttcaggggatggatcaagtgtatatgtttcccagtctaaaggcagaatatcttcgtgagttttagctgctaaaatttttgttttaagttcgttgaacttaaagatcaagttctgtttatgttgaaatgcttcgctatagactttgagccattcttctcttgtatgcttaatataacccgcatcttcggttttccagagaacctctgtgatagtagggtccatgtttaacagcatcatctgccctagcatgtttgtttgatcgtcttggtttgttctatagaagtgtccgttagaagcggtgaaccctttatagatgtctagtttacactgtgtgtccatacgagagattttcatatctttgtggtattgtaaaatgtcgtcttctgaaatctggttcacaggaacaccctttctactagctaagtatctaataaattgatttttctcctctaagtcaaaagcattataacctgattcgagcattttctgttctagacgagttaaagacatcaacatctcctccattattgtttattctctttttccttgttttcttgtaatttttcttctaattgtgcaatatatgctcttagcattaaattctcagatgtcagttcattaaccgcattttgatactcaattaacatgtactctgataggatttcttttttatttttcattttgttgtcctcctagttgttctttaagtttttgtacttcttcttctagctgctttacttttgtctggtggctcctgaccagaggtatcagaaatacccaaagcctatcgtaggctataccctctacctcagcgttaccttgctcgtcttctgggccgtatataacaaacatgtctaaaccagcatctagtagctcctccgcaatcaacccataagctcttttagtgctaggcataacagctaagttagggtcttctccactatgaactttagtcatatactccgccctgagttccatatccctcttatcatgccacgacttagggtctaaatatagtatcctttcaaaaatggagtcgtctacagactttatatttaatttatactttcgagcagagccctgtctgcccaagtcccctgtatttgtaattagggctgatgcaaccccattagtggttgtgatctttctggtccatatatcaactgattgtactctgtttcctttagcgtcagaagatacacttaggctccccccttgatcactaattaatctggcaacacccatactaccaaagttagtaatacctccagactcccctttaaaccagtttccggtattataaacgttaccagcatcagagatagttaactttcttgatgttccaacggctatctgaagggggccggagttgttagacatgttgttaggagcttctacaatacgccacccggtaccgtttcggaattgaatacctctgttacctccgggtcctccgattgtgtatcggtatgcgttgtctaccgacttgttctgcatatcgaagtcattattaaaggatatctttgatcccggggtattaaacgtcactacgctgtctcgaatagagaactcgtcatagtcatccaagttactggagcccgaagttttacctgttttaaggaatagaagaccttcaccattattcggttgtgctacatcattaaagaataacccattaagacctgtgatatctgagttgtttaagtgtaaggctccgataccttctccttggttggttgtctgccaaaaagtacttccgaagataacacgtccgttaatttttacttcatactctccgtctggaaaatcgaagaaacctacagactttctgtctgggtccataaacatgataggccgtccagcaggaacaacaagacgttttgttgtagaggttaacatgtcagatacttctacttcaatttcaaaagtcagagttgtatctaatgtaagtggtacgtttgttgcggtatagcttggaaacccggacagactaaatgcttgccagtctccgaaagaagttgcttccgcctgcttgtatcggtatcttgcaatctctacgctgtttctattggttccgttcacactaagaggagatacactacctttcagtgtcaaagtggtatcaggttcaaaaccatttgtacgttttgcagttgttgtaactacaggtgtagagtaaggaaccatttttatacttttagataccgaagtactaaatcctcgggaatctactgctttaacagttatcgtcgtaacatcgcttgacgcaatcgtaccgaagtcgattgctatagcttcgttagacacatagtttgcctttttggttaccccgttgactgaaactgaatagtagtcgattgtcgctccgtttttaggagttgccatcgcttccttcggaatctctactcgtaatgtggaatagttctggataaggtactgatcatctgctgtgattgctaaagttgtcggattcgtatccatataatagattcccgttgcagagaagtctggcttactattgctttcccgaatataaaacttaatactgtgatctgttgacccaacaatctgatcaccgtcgtagtaagtcgtaacgtggatagtacctgctctattcgatgtgttaggcatctgggctgctagagaagcctgctcactagctgtaggagtccatttgaagcttgttgatactccagtaagtgttttcttgaatgacccacactcaattgaaatcgtgtgagtaaatgcactgttagatcgagaaatacctacagacatttcttggtcaatatagaagttgttagtgccgctagcttgaccgttggtggagctcactgtacttaggctaggtaaacttaccttccctgagtaagtattataccctatactatttcctccgctgagagtatgtaggttccacctaacatccattgaactcctctggttcaacctgtaaaaaatttcccggtattcactaacagaaaatgacgtagacttagatgtctctgaagtagagaagttaatggttttaatgtttttccagtttccatcagagcccttaacgtctatgtggagtctgtgaccaaaagaggacgactgcctagaaatagatatatttctgtttgttcctgctgtaaagctagggctagatgtcatggtagaaagtcttgggattgtgttcagtgtgtaagacttagaggcaatacttactttggtgtactttttaccccctaaatacacatctggtaggttaaaaacaccgctaattgagaaagactttttaccatcactattgtgctttattgttttggatttagttgcaagtagctttttctggtttgcactaagtccagccagaccattacctccaaagctatacgaggaaccatctattgttatagttccgcttgcgtatgcagtcgagttgactcccccataaccatctaaagcttcccagtacatcttcgctgtaacagtactggagttgtttgaaatactttgagaagctgaccatgagatagacaacctccagtgagcaccaacgttagtgtataacgttcctgataaagccaatattcttacctccctttctaagtaaacgttctataagtaatatagaaaaggatacctgtttgtcataattatattataacataaaataacaggtacccctctattttagtctatattcggtacgtaagcccatcctcttcgagtttctgtctcgatattcaggattttaataggccccatcgtcatttctgtttctgctcgaagtttcttcgttacggtttcctctccattaagatagaaaatcttttggaaagaaccgttaccctctgcatcgtagtaacctgcaaactcctgaggagtgatctgcgtatacccaatctcttttcggttctcgtctagctgagatactcggattccattaacgtccatccggatatgagtgttgtatacttcccctgtagctagagaccactgtaaaggtacgtccccgatggttagcattattcccgttaaggtagcgtctacatcagcgtaaccgataaatctaacagtgattgtgtcagattgaggggtataggtcatatgacttgcatcataacctgtgtttgtcattgtactgttatctgcaatctgcatctttgttaccccgtcttcctgaatctggacccagaatcggtaagacatggtgtctccgcctgtccttttattcagataccaagataatgtataaggctgccccacattaactttaacagtttgggcgatccctttattaacaccatcaggtttaaacaggaacccactcccgaacccgagactgtctagttcgttggtgctaatagtttcaacaagattcggagggtaagtcaaatcccaaaagtccagtcctgcaaatccaatagagtttttaattaagttcagaccgccagtagcgtagaacttggcagtaatgttgttagctgtctgctctaactctgacttagtaacataaggagagaaatcaattgcatttactgcatttgtgattcgatcgttgacatccttggaaaggtcatctagctctccagaagttgcatagtttcctaagtcctcgacactagccttactggacatggctatctgatactctatagactgagtaacggtgttaacgattgagctgtctgtaatcttttcctctgctttagaaatccttctttgcatcgtagggatcaaatacttcagactatcggtaacggtagcaaggttcgtagcgtatttgatcttaccgtcagttatcggaggagtgttaaccgggtagtcaattgtgattgagttctccccttccaacagggacagtatgccatcataagtcaccgcttgctggattgcatctatgtaacgataaacgatctggtactcgttaatggactgctctttaatcgttggagaagagtctgtaggaactgggttgtgtgttggtccagacatagttgaacggcttaggtctgtgtccccaatagggtaccaaactttacttcctgttccatcatacggaacaccgaatgtcccgttacacattctccatccattaaaatacgcttttatctctggctctgtaggtgtgtaggtttctccccatccgctgtctgtgtcacttacagtgataaacaacgtattagtatcattgtccaccattacctcatcagcagcacttgtagtgccactggcagcggctaagaatgctccgtcatatttaaccccttggattgccatatctgcaacagggtactcagagaactctccgaatttaacttgtttgtatccggtgaaatcttgatcgaacttccagtcaagtgtaccgtctagagatacatcgtcccatcgcttaatcttaactgctctaccctctaaatcccatgtaaactcatcattaatcgttccatccccgtatagctttgtatacagtgttaaagaccctgctgagttaaaaattggattcgtgataggtacaagcctgtttccgtttagcgcccacgatgactctgcatctgggttcattgaccacaagtctacgtgtcttccttggaatgatggtagacctaaacttgtaatcggagaattaataattgttgggttagctaacggaacttcctgaaattgctgtgcgttactgaccgctttaattgcatcctgtttagccccgtctgctactatatcagaatactctttctgtcgtttcgtgactttaatttctagaaggttagctgcgtaatagtaaccattccatgccgcatcccactcatcactgttaatatcgagtgtttctgaagagtcaatatcccacggttttatgcttaggccagacagatatgtcctcagcgatgtataagcatccccaagtttaacataatccgcatccgtgataggtacaccgatctctctagcttgctgtctaagagtgtacaaggaccctaccccgttagcgtctacttctgctagtgtaggcatatcatcagttgcagaaagataaacaccgatgatgtttgccaactctcctcgaactacgcttcgttcataacgagtaagtctgttatctaaatccaagtcagtaatggcattatatgtgtcttgaattttatcgtaagcatctgggtccaattgacgaagactatcatagtctgttgggtcccagtttccgtttttgtaaatgtacaagcgatacggaggttcccctgaagtattcatccagagtgttccttctgtcgggttttccggtggagtatcgctaatggtgatgtcgtaagcaaacccaataatagaaatctgagctgcggcaatacctgttacatcacaagtgaatgttgctctgcttggaacgtcctgtgcagtaatgtgtacagacttcattccggaagagtgagcattgttccattgttcgtctcctgctgcatcatcggaaacccgagtccacttaaacaggctagcgtctaaagtgtttgttaactctttatttccatggtacactttacagaataacgtagtatctgtagacccatctctaaagatgtttccgttggtgcttagaatgtccgccttataggttacgttcttctcaacgtcatctacacgactattcgtatctcggatttctttagtcaaggtctcgtccgtagctgcaatcttagagttaacgtcagagatagcattggtgaatgttgtggaatctactttagacgtaatagactcagctaactgagtgatctcagagttgacaatcttaatctccccgttaacatagtctttggcgtcgtctagagcttctttagctttagcaaaagaaataatatccacagcagattcaaacgccttagagaggtctccaagggccgctctgtactctgcaaaagcctgattaactgcatcacggtcttcttgtgtaatcttaccgtcaacaatggctccatgaatagctgcaattaaaccagcatgttttgcatcataagcgtctttggcacttttcagactagctttccctgcttcagacaaatacttattgttataaatctcagtgtacttaccatctatatctgctttctctgtgttaatcgtgttaatgtacccctgaataacttttgcctcagatgcatcaataacaccatctttaaacgcaccatcgatataactatctaagtcagaaatctgttttccgatatcctcaatttcagagttaactccgttgaccaattcttcagtaaattcccttatatcttctaatccagcgttatactctgttctgctgatctttgtagagataaccccattcatcacagtaatacttgttttaagctcattcaagccgtcgatgatgtcttggaaagtaatctggtttccatccgggtcagtaccaccaacaaaagctgcgataggttttccatcaacataaacaccgtcattattgacttcgaataaatgcttttgagatttaaggacaaggaacccttctggggtgataccaaactttgaaaatttggttgactcttgttctgggtctgctgtgtcctttttctgagtgatctcaaatgctccgtctgtacccatttgcatgaaggtaattccttcaccctctacatgcctactaccaagtcggaatgtcccatcagctttaatgaacattgtcacccggtgattatcgtagatgccttggtggacatatagaactgtaggagcattaggagacttaggttcaattagctctccgtcagcataacgagaactaggaaggtcttgatagtcaaatgctccatcttggacataggcattatctgggtccgtatctgtgatgtacataaaggacttaccggagaaggtgatttcttggttcccgttaccgtcaatattcttatatgtcatagaagggtacagatcgaatatctgccacagctctctctgcatatcttcatcagcaatgtctccacctgtgaacgttgttcttgtaagctgagactggttatcggagtcgctgtagatattcagaacaatagggtattccttattcccttcaaggaaaccaataaggactaaggaacctacagttgcaagggttgttgatccatatacattaccgtctggtgtcctgcctccgaattttacgggcagtcgggcagaatatttaccattatcattagggttctttacgaatgcgtctttcccttggaccgttactacatcgacagtgttgtatttgtagttaactttaacgacacgagccaatgatagtttaacaacattctgcccttctttgtacatcctcctaacctctttacctagttgagattggagtctcataggtgaaagaggggtgttaaattgatcgaacttttcattatccaagtgattcaccctcctctagttttagcctttatatcgaagtacacggccgttaaatttctgccaccagtaaccactagtcatactctcttctttaatacctgacttactttgggagccgataaacttaccgttcccgctataaattccaatatgaccgtcacctttatatgtatcaaaataaacaaggtctcctaattggagtttgcttttagctgctgacttagacgatcctctagaacttactgtcatgagttgagaatcggttttaattgtgtctgttgtcattcctgtctttccgcctttaagggttatgccatttaagtagaaacaccaccatacaaaagcggaacagtcaattctaataggtgttgttaggaatgggttgcttcccgaccttcctccaccaaagacatatacagagttcctccctgtcatctctctggctgtttcgagagctcccattgctcctccacttccggctccatctccccatgaaccgcttccgtcttcagaaggggcattagcttttttagcttcttttaagaggtcttgtaaagagctctctccaaggtatcctcctttaaagtctttagatttaccccaaaggttactaaatcggtcttctccggagttaggtaatccacgggttactccgataacagttgtatacccgttggtgaaactaaactcgtgctgaacagactctacatagaactcccaagttgttttctgctctaaatcttcgtagagtacccgggaaccgagtctgtaagctggacttccaaggacacgaatatctccattataaaagtttccgttctcacagtaccagttgaataatctctgtgtaaatctttctagctttgcgttagctactcctttttccttattaatctccttgtctctttctgcatctcctgtagacgttgtaaggttgttgtattcctcccgggtaaacttgccttctttaagactatctaggatgttatttgccaagctatcagaaatagatggaaacttagagatcagttctgaatatattgtgtttttttgtgtcctaagaatttcaggttcttggtatccgttgtccgtaataaattttaaaacttcctcgtaagttggtagaggggctgcaccatcctgcggattggtagaagcgttggttgtatcattaagtgctgtcgatagtaaatatctattctgtgcatccagccgtttatatccttttttcttgattaaatctgggtggaatttagggtacacacctaagtccatactagtaaactccgctaggttaggcgcttgaacaacaaacactgaatacagttcctcgtcattcttacctacagactcctcgactacaatatcagaagtaaacctatactttggaagttggtaccagtagtctgggtcaaacggtgtcggtctcatgagagcagtacacttaccgctggccgtaaactcgaaaaatagttcattaaatggcttagctgctatatcttcaaggaactgtctaatacttccctcgtagttaatgaatggggtaacatctcctagagattcatccttttcccaacttgtaaagttatgatctaagtaatcttttagtccttttttatttgcaaaattgtacttagcatacttgtaaacaaacttctccataagttcgttaccaattcccgcagccgtattcccggaaaatttaagtccactatcgtcttgcctatcaggtaaccatccgtctacaagtactgtagatacttcttgaatgactcctacctcgaagtctattagcgcttttgtcatagctcgaccagttatacggtaaaatagtgatccttccgcaaattccccttctttacgaatgtcagaaatcaagccaaccataatgtaggggttatccggtctacctttagttgagtcaggaataactctaatccttattaaatcgttagagtttattatcttatcccacttttccttagcaagtataactaaagagaagacaggactatcatcttccatggagtttttagtactgaaagagattaatgcctcttcaaagtcattttgctttaactgcttctgtttttctgtatcgtatgtaagctcatatgatgtcttctccgtaatcaaatctatttcaaattttggaaatctacgaacaactgtggtcacttacaagcacctcgctttctaaatccatgcttacgtgctattccgtaaacaacaaattttgtaataccatatttacgtgctgttttatatgccgaattatttttataaaagctaagaatctcctcttctgaggtcatatagttgctcctcttttttattcccatcttataagcattttttcttactgttgacccggatacattaaactttgctgctgtatctttttcagaatgagttctataatactctaccatatctttgatatagttaaaattttctagtgtgtatctcttatctgtacttacagaaggaaaatatttatttagctcaatagcgacaccctgcaccgtatcaatcgtataaggaatctctataaatgttatgtcattttcttggcagtatcgatatttctttttatctgcctcttgttgatcctttaatttattgaaaatcctgtttgacggttcttcatagtaatgttgtctaccattatactctatatcaaatttttcaccattacgctctatataaaaatccatgtactgtaagctaccgtctgggtgggtaattgtgtactgtgacttaaagtcgatcccgctctgctttaggatagaagctatacacctctcaccccaacttttatagctatctaaaggacatcttacacctgttctgaaggtgtcgtaacttactgcccacttattcccttccggagatattaaatcaattttatcagttactttaatattttctggcatatttataaccctgtaaccttctgattcaaacttttctcttataaacttttccttttccagcagccctctaaaatcagggcgtttacctttaataaagttgttccatgaagaagtggctaagtaccccttatattttccagtcataataaggcatctcataggtacagaactacctgtatattcgtctaagacgtataacccttcagccaacatcatatctttaacgtataatcctcgttcttttttattcttaaacgattttagaggtaaatatctactcatgctatacactcctttttaataatatagcataagtctatctcaaggaaggtaccttttaactacagtagtgataggtcatccctccgatcttataaaatacctctcatatactattataacacgaagaataaaaaacgaagaggttataccctcttcgtctcttgtgaatagtgctgcattcctccgtagatactgttctgaattttagtcgccattttcttcatttccgtactgtttgcaaccttagacgatacatcgtttccagttacattcacgtttatggtagactctactttcattgttccggttcctgaaggagctcctttcatgatgctgctgatacggttagcccattgcgggtctgtagcgtatccagcctgcttcatcttagacaaagtggtgtttcctttattgtagtaattctcagaaatccacttagctccctctatgatacccttttctctaccttcaaatgacttagcagaagagaaaggagagtcatcaaaagcgccaataccgaaccagttgttcttgctcttgaggatgttagaagttccccatcctgtttcttgtgcagcgtgtgcaatcaagtaacgagggtccagtccagactcctgtccagctttaaagaatgcttctcccatacccctcattaaagagttcttaggtgctttagagtcaatccatttgttaaggtcttcggctgtaagtttaccatccgtataccctaaatcggagtttgttaagtcagaagggttcgcccacttcttaccttcgggaagaatttttagagagcctgagctacctgaaatggcgcttccgcctcctcccgcacttccagttagtgatccaaaaatgcctccttgcattcttgcttggttaagaagacgagatgctctagttagtaagctgtcgtattctttgatgttttgtctctctagggctaggttatcagtcctctggttttctgctctatccttagtgtttgtattctccctgtctacctgtttgtctagctgactattcattggttctgctttttgtttctcttcaggtaattcagcggcttcagcttttttaggatcaaatagaccgcctagccagccgccaattccactacctcccacagaaccgataataccgccagcgatcccgccaattgcagtaccgacaacagggactacagaacctatagaggctccgagggcagcccctgccatacctcctccgattccacctgctgcggaaccgacggcttcaccttttttatcctccggtgcaagggcaatagcccctatgctggttgcgatactaagaggtaaggcagctttagaagcaaaactaccaacctttccgagaccttgcattatctttcctccgccggcagcagttccagcggcggtacctgcttcagcagcggcaaaacttgttccacccataaatcggtttagaggtccgcctccgccggatggtcctgtattaggcaatcctcctcgtctaacgttaggatcaaatagacctccgacagcagttcgtgtggtagttaaaaagccaccaatacgacctccaccgccaccttgcggtcccccacctccaggaaacctgtcgcttacccttccacgtaataacgaacctcccaaaaaagatgcagccgcacctgttgcagaggctgcgagggcagcaagagcagcagttgcagtataagtaacaggtgataacgaccccatagcattatttagttctcttaatttctccccgtagtcatacagctgagtcgcttgcttttctgttgttgcatcactctggttatcaatagcttctgaggaaccctgatactttgctaacttatcttgagactctttagctcctgtagccttgtccgtctccacatatttcttgatcgtttcctcagttaatttttcctgtcggtctaggtccattaagcctcttgcttgttctgctgtaatgtctacccctaatgcagactgcacaaaagtggcaaacgcctcgttttgggctgcttcagaacttcctccctcatttctagcccatctagcaatttttcggacattatcaacatcggctatacctttatccatcttttcacgtagagcgaaccttcccgctaaaccttggtattctgttccttggccaaataccatccttacagccgggttattaaatccttgacggataccttggtttaaatcagtcagaagctgtccgcctttttctccggttaatgaacgtactcctgaacttgcaagaacagattgcatacccatgacgttcattacttcctcattagacatagaacgaccttgggaagtactttggagaatcccctgtaacgcttttaactgatctttttcacggccttccattccgctttgtttaattgcaccgacaaaggcgttttgtacatctttaacttgggaacctgatacagcaccagtactgaaagcagaatcaaaaaactgtctagtagtatctgcgtcaataccagttgtacgactaaatactgcttggttggtcatggcagcgtttaggtcacccatacctttatacccagcattatctagatagttaccttggaaggctaacatctcttgtcctgtaaatccaagctgatcttttaacccggcttcaagagcgttatctctaatgtctcttcgccagttttcggcacctgtacgctgtcccatagagataatatctccacgcatactacggtttagctgcgctccttggttgtagagacttccggctacggcagcagcggcaccagttactgctaaaccaatagcaggggcacgctcgtataacatacctcttgtagttccacgtttaggtttaacctcaactccgccgtctttagcaagctcatcattgtacttacgcatgttattaatagttctctctaaagtacggttgagctccatccgtgtttccatttcttggtcaatagaagctatggtttgctgcatagcaattttcatatctctatctcgttgggaggcgttaggattagtctcaatatcgctaatcttctgcttcaggctggatcgttcttgaccgagactagccattgcattagtattagcctctttttctgcggcgtaacgggtacgagaagtgttgtaatctttaatgaagtttgaatactgttgataagacatgtacccagaagcactagctctacgagacaagctttctgatcgtctatccagtttatttacttctctaatcttggcgatgacatcattaagcttacttgatgctccatcagcctcattagacatcgctgaaataatggacttagctctgttgaagttctgagctcctgtaggaagattgtatatatcattggagttaaaaacatgtttaaagcttttagaagctgtttgttggaaagaagagagctctcgaaacttggctaaagttttagtatactctgattggagggctttctgctgagcgatagctgctctgctttgctcatccatccgccttttaaggtcttgtatttgccttttttgttcattggtagctcctttaggaatgacagtgctgtcggccatatctctcattttccgttggagtccagtaaggtcttggtttaatgaacgatacaacttagagagctgagacattgaacgcatgtttttgtccatgtctttttgagtggttgtgaaatagttgtctactccacggcttctaatgttgtcgatctggtccattaacttattaatttgttgtagctttttcactgcattctgggtattagcgtctacatcaaaaatatacttctctacgtttgccacgttatcaccacactccctctgtaagataaaaaatagaggcagaggttaaaatagccctctacct

SEQ ID NO: 5 - DNA, 60862 bp, bacteriophage
agttgcttcattcggttgtactcgtctatctgtggatgacttggtgctataccggtgctacatttagcacttctcaaatctgttttagcaccggtgatggcatgggatctatttatactaggaaaaatcaggatggcactaacaagttcacagcgcaaatacgcattaagagaaagcaaaaagtagtctatcaagagtcgcaaacttttaataagaagacagtcgcgcaagcatggatgaagaagcgcgaagctgagctagctctgccaggcgcactggacgctatcataaacaagtctgacgtaaatatcgcacagattatcgagcgctatttagatgagtatgaagccgtcaggccgctaggtagaaccaagcgagcaacactgaaagcaatcgcaagcacaccactaggcgaggtcatggctgaggaccttacatcgcagatcatagtcgagtacgcgcagcaccgaatgaagaacgatggagtgcaggcccaaactatcggcaacgacttggcgcaccttggcgcagtgctatcagtagcaaggcctgcatggggttatgcgattgacggtatcgcaatgaaggacgccagaacagtgctaaaaaagatgaacttaatatcaagtagcaaagaaagggaccgcagaccaaccatcgaagagcttgagctgatactgagccattatgacgacatgaaaaaaaggcgcaatcaagaaatcgatatgtttaagattgttggttttgcgctattctcgacacgtcgcatggatgagataactcggatcaaatgggatctggtagatgaggaggggcaaagggttctcataaaggatatgaaaaaccccggcaataaatgggggaatgatatctggtgctacgtgcctgatgaggcttgggcaattatgcagtcgatacctagaagcaaagaagggccgttcccgtacaattcaaaatctattagctcgtcattcacaagggcgtgcaagtttcttcagattgaaaacctgcacttccatgacttgaggcatgagggtgtcactagattattcgaaatgggctgggatatacccaaagttgcttcggtatcagggcatcgcgactggaactcaatgcgcagatatacgcacttgaggggcgtaggtgataggtacgaggggtgggagtgggttaatcggatggtagaaagtaagagtatactctaagcgcgttttctaccccatagacgttcatgatcatccttagctgactggtgctgcttatctaggtaggcggcaagatcacgaacatgcacgccgcgcgcggcctgcctgctgctatccatctgcactaaaggcaagtctattttgccgtgcgcaatgttttgccgcagattctttggtgataagtggctgaagtagtcagcacaaacagtatcaacaggaatgattgcctggccgttgtattgggccattagtaaaaacaaagtattcattggttgccttttttagttagtctctgccgttcaagtagcgcgccgcatcgtttgcactgctgcttttcagtggcgcactggtcgttaggccgccgcgttttgcgacagattaccttggtattcattaagaccctgtgcttccaaaaccactagatccgcgctctgtatcgctaaggtctttgctctcttcaaaaaaaacacgcaccacaggctgtatggctgcctgagcaatgcgctcacctttctctatctcaaagcctgagctgcttgagtcagtaaccagcaagactttaacttcgcctcggtagtcgtggtcaatagtcccagaaaaggcatgcacaccatgattgaaagccaagcctgatcgcgggcgaataaccatttcataacctggtggaatctcaacggatataccggtgctaactattgctcgaccgtaaaaactttgagtatcttcaagagcatatagatcaaagcaagccgcgccggcactgccgtatgtcggagttttagcgtctgggtgtaatttctttaatttgattatcactttgccaccttgtttttcagtttcattttgtctagcaatttgtctagcaatatcgtcgtagaccttcccatcattgccgttttgcattatcggaatcattctttcgtctgctgacgccggccagttgccctgccatgcttctgtttccaatggcttctttacttcatccatgatctcggagaactcgaccagcggtctaacaaagtgctgcccgagctcgttgtggtaaacaacaaagctgtcgtcaccactggtattcagcgatccgctgcctcttgcaattgcatggatgcgatacgatccacctttacgtttgtgtttaaattgttttgtttgcattgctcacctcaatatctcgcaagtgcatctctagcagcgcaatcgcgttccatgcttcatgcgccaggtgacttaaccctgagtcggcatctactttctcaatcgcgccaagcagcatgtgccttcctttggcgtcccgatagcgcttttctttatcagcaactaaaagccaattatcgtcatcgtatttttcagcgccaaacgctgccacctttgagacttcaagcattgctcgcgccattgcgctgaaaatcagatcagggcgcggcttaccttggtcgtgcttaacgcccttgctcatagcccatgctccagcagatcagcaatggccgccgtcgattgatctggctcaccaagcttaattagcgttatcacccgatccattcggatcaagtattcgactgcattatcgatagccccaccaataagttttggatcgggcataacgtgcgtattaacgtcgcttttatcgcgacgccataagttataggcagcaagaagctctgccgtttgcttggcgttcataattcaccacttaccgtatttgtttgagcgtgacgcgagcgcgtgacgttatgagaaaattgtttgtttctgctctggcgttaagaactttgcaccatggatcagtcgagtgatcacgtcttgcggctcgtcgatgccagtctcgatcaagagctgatcaagagcctcgttagtgctgtgaaaaagctgcagcttgattgtcttggctagcagtactgccagcctttcttcttcgcgcagcttgtcgcgcgcacgcttttcacgcatgcgctcagctgctgttttagctgccatgttttacagccttgattttcatgtagaccctgcgccaaaagacctcttttctatagtgaaaaccgtatttgttatacaatagaaatgctctgagcggtccgactactttgctgaagtctataatatcagtacctggcggcataaagttccgagcatcgtccatatccaaagccatgagccctgtgtaccgctgaatatgaaaaccagattgcatttgcgagccagattttttagttaaaaaaatcctaaaaaaatccattggtatggtcattttttaaaaacctcgatagttccaattactacagctgcaacaaccaaaactaaagctggctttttcttgtcgtttgcatcgtaaattgccgcaattgctagcatgtaaaaaaacagcatagatacctcttacgcatgcgctcagctactgttttgtgtttcattgctctacctaaataagaagcgctcgtttaccgcggtatgggttatcgaacggaatatcatcatcaaagctatcgtaattaggctcttgctgcccgcccgcttgagcgttagctttaggagcagggctacgcgctggctgttgagttcgctgagcgggcgcgtctgtattgtcactacggctatcaagcatctgcatagtgccgcccatatccacaataacttccgttgtgtagcgcttcacgccgtccttttcccattcacgggtttgtaatcggccctcgatgtaaacctttgagcctttgacaagatactgcccagcaatctctgcgatcttcccgaaaagggaaacacggtgccattcggtacgctcctgcatttgaccggactgtttatctttccagctatcgctagtggctagcgttaggcttgtaactgcgttgccattcggcatgtagcggacttcaggatcaccgccaacattgccaattagaattactttgtttattccgcgcgccattattcagccctttgtttgtggtatgcagatagcgctgagcagatatggtcgtacagcgtttctgaccgactaacgtgatttggaacccatatcgtatctgcgattgccggatcgtccgattcaagtacagtctttacgacttctagcgcgctctctagctgagcggcttgggcttgcataacttcgcagtctgcaatcaaatcaagaatcatctgcgctcgcgggtttaggccgcctttttccgatgcttcgcgttttagctcttgcatgctgtcgcgcaataactggtacttgctcatacatcaccgccatgttttcgatagtcggcaatagctgccctagctttatcaaaatcctctccagttggcgttgggttgaccatgaataactcaagaacctccagcagcttcgcaacttcagtcgcttgctgcgggtgagcatagagcggggtggttgacccagggcttagctgctcgcaaaactcagctacatctttgttagtaatcacatctccgcaaaatgttttttctctaacgagccacgccgtaggctctaccagtttcgtaacgtcatcagctggattctcaggctcaactggcagcactttgtaattacatttatatccacaatctggatcccagtagtcgcctgcctcgtcgcggccgtcctcatcaatttcaccatcaggaaaaacctgatcgcacatcttggctctatgtgttatttttccaacacaaacactggtcacttcctcgctccaaccgtccaccaaatattcttgtgtccactcgctggcttcatctagcgcctcatctagagtttcaaaacaatcaaaaccactctcattgcaatacacgaaaaatcgatctttcatacttaatccctacaattgaaactccagttgcacttcttctgaatgcagctggcgctttacttgggtttgcttgcgtaccgcttcatagccacgcttgacgcctggcagcgcaaagctgctttgctcgacttcagaaataaacttctcagcggcatcttttgctgagaagtagcgcatgtacagctcgtggcgctgcagcttctcaggtctgaaaagatgctcagaacaacgacacccaagcgggcaagtgcttttacagccgaatggctcgttgccgtttggtatcagcttgttgaactctgctcgtgcgaattggaaagcatttttatcaatacggtggccgctgcttgccagccgctctagcgtttcaacttgctggccagctagcgccaagcgctcttttagctggcgctgtttctctaaaagaacttcatcatccatcatgaaacccgcccttaattattcagcgcaataccaatactttcagcaatgcgaatcactgacggcgctcgcattttgtagccgcgctgacgcatagcttttgcaacttcagtcgctgatctgcgtattgttacgccttcaatttcaattgttgatagatctcgtactaggctagcgatctcctcgcgagcaacaccgacctgtttagcttttgtttgcgacacgttgattgcagagttaaaagcggggcgctcgtagcgcggcacagtgcgagtttctagcacagtgatctcgttggatttaaggaactcatccattttgctttgcagctcattgcgcaccgcatcgcgcattacaatttctgctgtatagactgatatatacgactgcatttatcagctccatctaataagtaaaaattagcgcccagcttgctgagcgcatgctaaaacagagttggctaggcgctaagcggcttcgagcaggctcatggcgtatgaatatccagaccaattatcaacacctgcattttcaagcgctgttagctttgctaaagcgtcaagcagctccctgtactctgcttttgtgattgtgatgagctcaggcgcggcattggctgtcactgctagatcttgatctgacgcttgctctgcaaaagtttcatgtttcacttcagcggcgggcttggcgcgagcattttcctctgccagtttttgttttttgctctcagcatcacgctcagcctttgcttgttcttcagcgcgaatacgcaagcgctcagcttcgatgcgcttttcctctgtcgccttgtggtcagaaatgcgcaatctaaccaatgaacaaaaatcatcattcgacttactgataaagccttgtatgtctgaaaacagaaactcaaaaccggaggcaagctctttataactgtcaatgtttgtgctgatgatctctgcctgcgcattgatctcaattttggcgcgagcaagctcagagtctgctgcatcctgcaggcttgcgatagtgcgcttacctttcattgcacctgcaaaatcagcacggaagcttggtatttgaaacgatccaagacgcttattgattgccgcaacatgatcatttaacgcagcggcagcattgttaagaatctcagcgcggcgattgtccttcatagccttgaccagcttgtcgaggtttaggcgagtggtgcgcgtttcctcgccaatatcgtctaaggtgcgaaacaactcttcaatgctggctgtctggcttagcgcgtgctgcttggctgcttgaatgcgaccctcaacgtccttacaccatttgactgtttgctctgcatcagcaaagtcttgatctgttaccaggtcacgattgattgagccgataacgcttagcgcatgcgacttaaacaacgcaaggttgcttgcagtcaccatgccggttacttcgatacgcaaggctggcagcgaatcaggcgctttacctgctgcctcaacctgcttaggcgcaggcgcaacaaactcagcaaggtcttgctcgaattgcttccagccggcaacaagctgctcagcacgaccaggtacagcccggtattccatgtggaccatattttcttctgtgccatcggagcacacgaaaatcacatactcagcaccactaacaagcagctgctgctcaagctgccaataataagctggggaaagatcgccagctttaacctgctcaacaagctcagcattccacagcttgtgctcaaagataacgtcaccgagcatgcttaggccatccatgcttgctaggtactggtccttagtacaaacgaccggataaagttcttcgccaatcatttgttcaacaattggccgggccagcgcttcagtaacatggccgcgatcaaagttcttttgagtgaatgcgtcgatttcaggcgtaaggccagtttttttctgtgccagcaactcggtgcgcgactggtatttagagcagcccatcatagccggcgcttcagaagcggtaaaatactcggctcgcaaagcaagccattctggtgttccctgctctacagtatgaactttcattgctttactcctgacttgattcgatggctggatctgctttgatgtttaggattatttcgcgctgctcatcgctaagcgtgtgctttgactcgatcattgaaacgatgcgctcaggtgtagttttgccgatacctacggccgcttcccacttgggcaggttggttgctaggctttcatcgcaatacgctggcagcgactcaatgcgctctgctgctggggtcgccgcccgattaatgtcacccatgtccttagtaggcgtatccattagctcttcagctaccggcatgccgcgcagcacatcggggaacacatcacgcaaagcaaaggcacgcgctcgcatttgacgcatacgcttcgggtattgcgaccagggtccctgctttccagacaagccagcagctttagcatcggtcatgctgaaagttcgcacttgttcttcttcgccgcgacgcttaacccggcaggttgccgtttcgccgtcgtctgtttcgtaaatgtgctcgcacagtggcgagcctcgaacaataccgataacagcgtcaccccatagggatggccggccattgattactgcgatgttttgcatggcctgcatcggctgcaagccaagctctaagccccactggatagcaactaggatattgccagagttgcccttgaagtctttgggcacaatgtcagacttcgataaaatctcagcaaaccggattgcttcatcaagtgattgcggcgtcagactgaagcctggcttttgttctgttaaagcattcatgtttttctccacgcaaatgcaagccatcgcaacttgcgattgctaaaaaaaatgatttaaaagttggttgttgcagattagagcgttaaatgcagctcaatagcgccgctgatgattagtagatctttggctaagccttccagtccgtcagcgcctacaagacgcttggcgactgtttgggcgccgcttgctccgttgcaagccatgataattagatcaatttgcgcactatcctggtcttcgtcccactcaaggcatgaaagatgctcgctaatgtgcgcacgaaactgggactgagtaataaagtcgctatcaaatcccgctgccagcgctacggcttggccgtgcaaccagttcgagccttcggtgctttccagaaaccgatcaacagccgataccgggttaaaatcttcttcgtgcaaattgtcataatggagctgggcagcagacatgcgctgagtattagttttcataaaagccttccctttagttcgttagggcgcagcgttacgcgctcaatagccaagcatctttaaatggcgctcagtatccatacgctcctgatcttctttactcaggaaggtagcggtccataactggcttgaaacgtgaacctttagcgggttacgcaagccaaggcgtgataccagcgcttcaagcgaggcacgacttttcgcaacgacttcgactctttgagtggtcatatcaattccttcttttcaaaattagggcagctgcacacgccggcgctgcggggccggttgaatgggcattacgttaagtaattgcaggtgcgctctgcggtatcagcccgagcgggctaaatttgaatgctgttactgaatagaaattatattttcatgactgcagcagcggtcaatgccggtgaagatggtgccagtgcaatacagcttgtacaggtaaccgataacgccatatgtgtgcgtcgcgccgccaaggtctgcagtgatgtgacgctcactatcgtcctcgatgtagccgatgtaccagctaccatttttcttatggtcgtagaacgagactttgaactggtcttcgactttcatgtaaacagctgtctcgtcgctgttcatggtccactctggcaagatgtatggaccgtcctcaaactcaactccagcgctgtcgctgtcgaagaaacagctaagctcagaaaggaatttttccccggtaatctcttttggcaccggctgcaggactttcttgatctgttcttggattcctgcaaccacatgctcgttcatgtgtgctgatacgcagtcaaccactgcatcgctgataaatttgttgtactcaggtaatgttactttttcaacagcgcctgccagtgactcgcttagcttttctttgatggccttgccgaagtcgctgtagctgcgcagcgagtctttaaggatgtccgttacggagtcttcaagctgcttatcaatcagcttctggatagcaccgctttcagtcatgttgttcatgcgggcaattattaagtcgttcaattctttcattatcaatttcctaaaggcgtgataaagcaaaagcgcgccgtggcgcttgactgatatgagttttgaatatggcgcgcccggcaggactcgaacctgcgaccacccacttagaaggcgggtgctctatccgactgagctacgggcgcttaatgaaagcccgctcgatttgtgcgtaaccatttcgcgcatctgcgcgagatggtcataggcatgacgggtatgtttaaatctttgccgcttacgccggcaagtcggtttatatgatcactgctagagcaattggcttcgccctctattgaccgtgcgatcttgatcaccccgttatcgcacgtttacggggctgctcactggcctttttggcggcgtgctgagcgaattagtaatgcagtggcaggtgctgatctcctgcatggtgaacgccctatgttacccatccgactgtcagacacctgtacgcctattatggtaggtcgcaacttttatcggactccacgatttcagccaatcagccttggcattcactgcattaaaaatagctcaactgcataccttgcgccgcctgcaggacggctaaccattactggcaatcacgaatcgaacgtgagctgagctatttttaatacacactggtaacgccagtgactcgtccgctctttcgctacatgcgcgactacatgcatatggggatatcagaccctagcttgacgtttattgttatcaatatgcgctgcttggccgtgaggcaagcaggcagaggatgcctaccgctaacatattgagcatcttcgtgattgcgagcgcccacgctgttcctagcacagtaaattgctttgaaattgttttatgaaagtgcggcacagtgcgtgccgctggatcaaaagagggtgggttacttgatcttttctgcttggatccgcttgtaaatctcttcgcggtgtacttcgatatctttgggggcgttgatacctatgcgaatttgatttccttttactcccaatacagtgacggttactgcgtcaccaaccattagtgtctctccgatacgtcttgtaagaatcagcatgatttcctccttttcctttgctgtaatattgagtgtagactgttattttaaatgtgctcagcttgagcgtttcttgctttatttacagccgctttaattcgattgcgagctgcgttcagctgttcgtgcgggaagactcgaatatccaaaagcgcatccatgtatcccatgacgctataaaacgccatattgctgtgtgggctctcttcaacatggactacaaggctttcaagcctatcttgcatgcttggtaccagttcgacagccaataaattatcatccatctatttgctcctttatttttgctttccaaagcgccctggtaacaaggcgcttcagtaaaactttcccaatctaaaccgctgggtaacggggcgctaagcgtttcgggtcattcgccagttaagtcaacacatcgtcagccgcttagttttctaagcgttggtagccgttacatggctatctgatcgccggtcgccgtagaggcttagcggtctatttctcggtttactgacctcccaccgagcaagcggggagtgacctaggccatcatcgagtgatgggttagtcgttcatcgcatatatttttaaagagccttcgcaacaggtgaagctgttgttaggcttagattacaacttaaagttgatacattgcaagtgaaagttgcaggtattggtgctgaaagttgtagattttttttaaggcgaaaaaaaacccgcacaaggcaggctatttttcaatgatggatttgcaatatcttgctaaaaaggctcgtacttaccgattaccacgccggctatatgacagttgctattgatttgaaaaatgcgctctggccagtcagggttcaaagccttcaaaaaatggttatcaccctcaactaccagctctttaaatgttgcctcatagccgccggtcagcttggctattacaaggcttccatgctgagcggggcgctcagggtcaacaaagattaaatctccatctttgaatgatcttttgcctcgcgggtcgtacatcgactcaccgcgaacgcgaagcacgaatgcctttgagctgtgagtgacagggcagtgtagccactcttctgcctctgaaggatcgaacacctcagcaatttccgtccattcgcccgcctgaacccagctaataagcggcagcctccctttaatacttggaccatgctctacgttccctgacaaattacccaccattaggtagctaactgtagtggacagtatcgaggctagcagttctagccgcttaccgcgtggcacgttttgcgcgctttcccacttctgaacagcttgtggggatacggacaaacgtcgagccagctctgactgcgagagaccggcagcttcacggcatgcaatcagtcgttcgttgaaattcttcataactcaacaatacaacccgcagttgtatatgtcactgcaattgtaacttgtagttgattcgtctattctgtaactttaagttgaagtgacttagggtaaatcatgaagaaaaacgcgatacaacgagcggcagacgctgccggcggacagtctgctctggcaaggctgctggcatgcacgccgcaggccattcagaagatgtgcgcaaccggtcgcgtacctgctgagcgagtactgaaaattgagaaagagactggggtttcacggcacgagctcaggccagatctgtacccaaattaaatcacaggcataaaaaagccccgcgagatcagcaaatcagtgcggggcttagtacaaacaaagagaggccattatgaagaaagaaaaaaacgaaaacaagagtcgagcagaggtagaggaatcttcagctcgcaaagcttcgcttctctatgacgaggatccagccacgctgcttgccaggtttggcatacaagtccctcccgcaagcaaagaggcaaaccagaaatgcaatacacagtaagcatcaatcaagttaaggcgctggagtggggattgaatgcccagcaggcgctactgtttgcatttatctatgagtgcccaagctgggctaacccgattgagtctataaacggcaccttttatgctgtaagtaagcaaaaaatcactgaagagctgccccttttaactgacaaaccagacactgcttacaggcttttgaagcaattacagacggctggtttaattgagctatccagcacatcaaaaatcactcttgtgcgactgactgaaaaagctaagtgctggaataaaaagcatgatgggtcggaaatttatccgaagaagaagcgcggaaataaatccgaggtcggaaataaatccgatgtaggtcggaaaaatatccgcggtgaggtcggaaaaatatccgagctaaggtcggaaaaatctccgacaaatcagtataccagtaatcagagtaccaataatcaggataccagtcagagtttagcgaccgaggttgctaccgcatccacggccaccacggaaattgaaatcacctcttcacctggtcagcccaaggttgagattccggctgacatgccagggcctaaagatccaaaagcaaaaacctaccgcgtatgggccaactacgcattcgcattccgcaagcggtacaacgtctggccggtatggaatgcacgcacagcagggcagcttgcccagttggttgacaggcttggtcaagacgcagcacccaaggtggcggcgtactacctcacgattgccgatgcacgactaatcactgagcagcacagcgtcaacttgctactggcaagagctgaggcgctgcacacgcagtgggcaacaggtcgccgcgtcaacagcacgaccgcacgtcagcaagaacgcacagcggcaaactttgaagccgcgcaaacagccgctaaaaacattcttaataaatcagagaggtcgatctatgacaatccattctacaagccgtgacgcacagcgcactgcctcgattgcccaaatcgtaacggcaacagcggaagtgctaggccaagaaatcacagcaacggcggctgaaatgattgcaactgacctcgctgaataccatgacgagcaaattgctgatgggctcaaggcgtgtaggcgcgaattaactggtcggctaacactggcagcaatcatcgaacgtattcagcgcaccgacggacacccagagcctaacgaggcatgggcaatcgcactgcaggccagtgacgagcggcgcacagtcatcatgactgagcagatacaaaacgccttgatggcagctcagccgattatcgacactggcgatgcagttggtgcgcgcatggcgtttctcgatgcataccgtcgtctgattgcggaagcgcgagagcagcgaaaggaaacggtatggcatgtatcgctaggatgggatgtacagggccgcgcaattgcaatcagtcgcgcaatggagatggggcgaattggtaaagacatgggcgaccgccttttgttgcagcacaagctgccggaagccagccaagactcagtggggtttgctgtggccggattgattactggaagtccatcagcacagctcagtaacgaggagtcacgcaagcgaattgcagagttacgcgcagcaatgcaagaaaaggccgcgaagcaacgcgaggaaaaggagctcgcaaaaaaagcacagactgatgatttggctgagcgtcgtgctgcagtagccaaagcgctatccgagatgcctgagcgaattaggagaacggtatgaagctgcttgtgaactctcaagacaagcttgccgaggcgattagctcactccagcgcacctttgcagacaagaaatacttaaccattcaagtgaagactggtcgcgaccggacgcttgatcagaatgctttgtggtttgcgatgtacaaacgcattgcgcaggccatggaatggcacatcgatgaagcccgacggcactgcaaattgcatttcggtgtgccactcatgcgcaacgaatgcgcagagtttcgtcagaactggaatgaactgctattgcatctgagctatgagaaaaaactagagcttatgggtgccaacccattactggggccggatgggtttccagtaactcggttattcaatcgagcgcagggaattgagtatacaaacaggattgttgacgacttccgagagcaaggcgtgttttttgatgatttgttgaaggatgagcagcagtgagagttgttagcaagaagatccgaaacgcagctcgcggccagaactgcacgctgcgcctgagtgattgcaactttaacccagagacaaccgttcttgcgcacttgcctaatgggtttaaaggcatgggcatgaagggtcttgataccgtcgcagtgtttgcgtgcagcaattgtcacgacagcatagacggcagaacgagcaacactgggccggttgattggcgcgatataacacgcgcactagcagagacgcatgcagttttgatcagagagggggttattaaggtatgactgagaactctctttattgcttcttgattgcatggctatccggtgcgctgctggttttatctgttgttagagtactacagggcagtccgatcaacggatcgatcatgatggtgcttgccattttcgggacgcttagtgcgtggaggctggtatgagcattgtcgaggtgaaggcgtgaagctgaagcagaagatccaccacgaaaccgatatgccgattcctcgctgctggataaccgagtgcaagtacacggtggcgtgctgcggcactggggctaacacgatgtatcaaatcacagcgccgatgggcaggacaccgtttgcttacacaccatcaaaagctgaggtcaggaaaataattacaactcacaaagcgagggagtcatgagcataaaactttacccggtagtccccgtgccaaagccacgaatgacacagcgggacaagtggcaaaagcggccagcagtcatgcgctaccgtgcattctgtgacgacctgagagcgcgcaaatgcacgttccctgaatccgactcacacgtcatattccacatgccaatgcctaagtcatggagcaagaagaagcgagcagaaatgcttggccaaccgcataggcaaaagcccgacgtagacaacttgaccaaggccatcttggacgcggttttaaaagatgactccggcgtatgggacatgcgaacaacaaaaatctggtcagatattggctgtattgaaatcagaaaccccgcggagacagagcatgagtgagcctagacgtatcagcactacagagctggtttatgatgcgattgttgagctgcacgcgcttgagcagatcattacccgtgaagcgctggcagatcatctgaatctgaagttaagtatcattgacgacaaactaaaaactttagcgaatgacggcctgattgcacgtattcagcgtggagtgtacgttccagtggagcagtacccgccaacgcggccaatatcacacacagagctgccggatggcacagttgttctcgatataggtgatgacgtgcttaaactaactccacgcgaggcaagaacactggcagtcatgttgggcgctagagcaattcaagcgtcacagataaacctatctgaccaggttgggatgatggttgctgaaatatcacagcgcatacgaatactggagcgcgaagcctagtaaacatgcacaccctgtagagttttacagcccaccagcgctggtatcaaatcagcgcatgagcaagagcacaccaccaaacacgacaacaaaacctaaagccggcgcaaagtcggctcaaagtcgtgcccgtactaaaaatacgcaaggtaagacttcagcgagtcaggcagattttaagcaggagcgcgcattaacgcccaaacaagccgcttttgtgcgtgagtatctaattgacctgaatggtacgcaggctgctattcgtgctggttacagtgaaaggacggctaatgagcaggccgcacgcctgttagcaaatgttagtgtcagcaaggcagttgctgatgctcaagctgagcgagcagatagattggaaatcacagcagaccgcgttcttgctgagcttgcaaagataggctttgcagatatgcgcgatgttgccagttggggcgaaactgttgttgatgaagatggaaagccgatacatggcgttaagctcgtcagctcagacaaacttacagacagtgccgctgcagcaatatctgagattgctgaaaccccggcaggattgcgtatcaagttgcatgacaagcgagcagcactggttgatatgggtaagcacttgggtatgttcaccgaaaagatagagcacagcggtgcaatccaggtgcaaagcactgtcactttcgttatgccaaagcatagcgaggactgattatgcagatcagcttaaacctgcagataccgcacaagctcgcaccgctttacgagccgaagcgatacaaagttatgcacggtggtcgtggtggtggtaagtcgcattctgtggctcaggtgctgcttgaccttggtgctcggcagcagctgcgtatcttgtgtgcgcgtgaaatccagaagtcaatgcgtgactcagttcaccgcttgctcaaggactacatcatcaagctcgggttgactgcattttatgagattactgataccgaaatacgcggcgtaaatggcacgctgttcttgttcgctggcctacaggcgcacacagttgactcaatcaagtcattcgagggtgttgatattgtctgggttgaagaggcgcacagtgttagtaagaagtcgtgggacgtactaacaccgaccattcgtaaagaaggtagcgaaatatggatgacgctaaaccctgacatggagacggacgaaacttacgttaggtttgttgctgctggcaccacttctgatacatgggttgcggaaatcaactggcgcgataacccgtggttcccagtcgtactgaatgaagagcgcaagaaagccaagcgcgaaatgagtgctgaagactacgagcatatttgggaaggaaaggcgcgcacagttgcagccggtgccatataccgtcacgaaatcattgagcttgttgcaggtaagcggttgcagcgcattccgtatgacccgcttatgcctgttcacactgtttgggatttaggttggaacgacagcatgacaatcctgttcgcgcagaaaggcccagctgatatacgcatcattgattacatagaggaaagccatcggacattggattggtacgttcaacagatagaaaaaaggccatacagatggggagttgactatatcccgcacgatgggcggactaaaaactttcaaacaggaaaaagcactgaagagctgttaaggcagatgggcagaaatccttttgtactcgcagcaactggcattgaagagggcattaaggcagtacgcatgatgtttccgcgctgctacttcgatgaagacaaaacaaaacggttggttgagtgtttaaagcgctacagcaggcgcatacatgaaaaaacaggcgagccaatgggcccattgcatgatgaatactcgcacggcgcggacgtgtttagatatttagggcaagcagtggagttgatgcgcaatgacattggacatacagactatcaagaagcacccgctgtggactggcgcttgtgaggactagaccatgcaaaaacaagagctaagcaaagaagaatacgacgagatctttgaggagatcgagaatcagccgcgctggcgagccatagcagataaggaatcggactatgcagacggtaatcaacttgatagcgaactgctcaagcggcagcaagagctgggtattcctccggcagttgaggatttgattggtccagcactgctatcaattcaaggttacgaggcaacgatacgaacagactggcgcgtgacgcctaacggtgatccaggcggccaagatgtagctgatgcaatcaactttaagctgaatcaggctgagcgtgaatcgaaggctgaccgcgcatgcagtgctgctttcaagtcgcaaatcacatgcggtatcggatgggttgaggttgcgcgtgactccgatccgtttaagtttccgtatcgctgcaagacgatccacagaaacgaaatccactgggatatgaaggccactgagccggatttgagtgacgctagatggttacgcagacagcgttggttgtctccagagcgcattgcgttagtgtttcctgagaaaaaggagctgattctcgcagcaggtaaacatggctcgcagtggtggcaagatgaaacgctcacatttgaaggcggcgacggtactggcctcgaaaacgcatggaatgaaggccgctcatggacgatgcatgaagaccgttggtacaaccctcgcagtaaagagctgtgtgtcgctgagttatggtaccgccgatgggtacgagtgcctgttattaagacgcccaacggcagggtcgttgagtttgatgagtcaaacctacagcatgccattgcagtcgcgagcggcacagctgaagtaacgcaagcaactatcgctagagtacgccgtgcctactggcttggaccacacaaactgcatgacggcccgacaccttacgcacaccgccacttcccgtatgtgccgttctttggattcatagaagacgccacaggcattccatacggctacgtgcgctcaatgaagtacgcgcaagactcgctgaacagtggtctatcaaagctgcgatggggcatgagcgttgtgcgtgccgagcgcacaaaaggcgcagtcgccatgactgattcacagtttcgcaaacagattgctcgaccagatgcggatattgtcttggatgcggcgcacatgcagcagcctggtgcgcgctttgaaataaaacgagactaccagctgactgaccagcactatcaaatgctgaacgataaccgagcaagcattgagcgcgtatcgaatatcacggcaggttttaccggcaggtccggcacagcaacaagcggactgcaagagcagactcaagtcgagcagtcgaatcaatcactcgctagcatcatggataacttcagagaggcacgttcgcaagttggcgaactgcttatgagcatgattatccgtgacattggcgagaagcaaactgaggtggtgattgagggcgatgcaatcactgcggatcgtactgtaacgctcaacgcgcctgaaactgaccccgcaactggcgtggcatacctatcaaacgacattaaccgcactcgactcatggtgtcgctcgaagacgtaccaagcactaacagctacagatcgcagcagttacaggcgttgacagaagcaatcaagccactgccagccgagtacctgagcgcagctattccgttcttaacgcagttgatggacgtgccgttcaaacgtgacctgattgaagcgttccgcgcagtcggtgagacgccaagccctgagcagatcgaagaacaaacgcagcaggcggtacagcaggcgctgaaggacgcaggcaacgaactgaagcagcgtgaacttgaaatcaaagagcgcaaagccgacagcgaagtgaagaacttggatgccaaagcagttcaggtgggcgtacaagcagctttcgcagcaatgcaggcgggtgctcagatagcacagatgccaatgattgcgcctattgccgacacaattatgcagggtgccggttaccagaggccaaacccaatgggtgacgatccagactttccgacaccacagcaggcagccgctacagatatccgtaatccttatgtgcaaggtgagggcgctcaactaggtagcgagcaggttgccgaattgtcgcaagttaaccagaacaccagcccacaatttccaccggtacctagcgatggccagtcagccatgcaaggtattgaaacaaccgatacagcagacaacctgctaggaggcatgcaatgacagatgattgcaccgattgcggcacattcgcacgatcagcgcccgctgattacgactacagtaaggcgcttgacctgcttaatgagcgtgtagatatgactgacgaacagcgcgatctagcaaaggcatacctagacaaggtgcgtgatagtcaatttaaagaaggtgaacagcaatgagtagaacagaaggcggcaaagtaaccgagattattatcagcgttatgggccaagcagccgtttgcgacattgttgatactgagcagcatcgtcaggctaatgtatatctgccacagaacggtggtgccgcattgtttgcaatgtttgacacaggcaccgatgacgagacaatccgacaagcgctgatcccagtattgcgtggtgacccgctagaggtagacattgagatcacagaccaagtagccggtagtttgtttgctggaacaatcgcacgaccagtagttaaccttcaacgtgcatagctacaaggaatcaatcagacccgccattgtgcgggtttttttgtgcctgcaataaagccagccccctgtaggttttgaatgcaagcaagcaattagcaacactgcctaccaagctgtgaaagcagcgatacatgggcgcaagccctttgcgtaacccttgcggctacggcgatatgtggcgggaaaggcatgagtattaataacgagttaaaccagtcgaacgatggcgacctaacacctgatcagcttaatcgattacttgcgggtgaagattacgagggcgataccgaggcgcaagctacggaaacgggaggccagcccgaagcctccagcggtgatgatgaaggcgaaccaaagaacgaagcagagttaagcgctgataacgcagtggtaatggcgcgtgataacaaacacaccattccattcgagaagctggaagaagcacgtgagggccagaagcattggcgcgcacaggctgaagcagcacagcaagagcttgaagcattaaaagcacaggcgcaggcgagagctgacgcgggtattgcacctactcgaacagatgagttggtcgagcaggctgcagaagctattgagcaaggtgctgacattagtttattcggtgatttctccgaagaagacttgtcgagcggtattgataaaaagttcgaccaaaaaagcgcgccgcttttagagcgtatcgcacaactggaagcaaccttgaagcaaacgcttgggcctattcaagagaagcaggcagttgaggcgtcaaatgcacattacgacgccatccgcgcagcgcatccagacgctgactcagtagtgcaatcacaggagctggccgaatggattgactcacagcctacttttgttcgcggatcaatgaatgccgtgattcaaaaaggtagcactgatgaagttattgagctgtttagcgctttcaaatctgcaactggtacgactcaagcagcaggcaatcacacggcggaagctgtccggtcagctgcaaaacaaaaaatagctaacgtaaaaagtgatgtgcctgcaagcctgtcggatttcccagcaggtcgagcaggtgcgggatcacgcagcgaagctatgcaagaaatggcaggaatcgagctgctagatgccatggactccatgactccacagcagatcgaagatttcctaaatagaactgtgtaacaggaggcaacatgcccagccagaactcacatgcgccgtatggtgataagcacaacatgaagcagcaggccgctggcttgtttgctacccacttaaaacgcaacaacaagctatcgcacatgatcggcaaaatgcctaaaggcgaagcgggtgcgattgaaacaattaagcgccaaacatcttcacacctaccatttgtgcgttgcatggacttaggtaaaggcaccggtgacgagattacgtttgacctagtaaatccattcggtgccgtgccaattatgggcggcgaagtcgctgaaggtcgaggtaccggtttaagcctaagtcaagaccgtttacgagtgaatcaggcgcgtatcccgatcaatttgggcgacacgatgactaccattcgctcacctgctgacttccgtaagttgggacgcccagttgctcaggcaacaatggaccgctacatggaccaatcacttatcgttcatgcagccggtgcgcgtggttctgtaaataactttacctggtcaatcccactcgaaagcgactcacgctttaacgatgtaatggtaaaccctgtgcgcgccccgaccaaaaaccgtcacttcatggcatcgggcggttacgttgaaggcttcaatcagtctggtggtgagatgaccattgccagcacagacgtattgagcatgggcgttatcgattcaatgcgcgcagtgatggatgaaatgatcctaccgccaccaatcgttaagtttgacggtgactctgcagcagatgacgagcctttgcgcgtcatgctggttacgccaatgcagtacaaccagctagcagctgatcctgagttccgaaaaattcagatggcggcgcatacccgtgcaagtagtagccagcacccgatctttaaaggtgaagtcggtatctggaacaacttcttaatcgttaagcagcagatcccgattcgattctttgctggtgacaacattaagtattgtgctgatcacactggcgctgaaagcaccacaaccgttcctcaagcgcttgcagccgctaagtgcgcagttgatcgagcaatcatccttggtggtcaggctgttggtgaaggtatggccaagtctgacaagtcaacggtgccgttcttctggtctgagaaagaaatggaccatggcgacaaggttgagttgttgattggcgctattcgcggtgtaagtaaattccgctttaacgtgaacactggcgaccgtgtggaagctaccgactatggcgtatgcattctggacactgtggttccgctgaacaaggtttaactcagcgtaacaacacagcgtaacggtgggcgctaaatcagcgctcactgattcagataaaaattggaggccaaccatggctacagtaaaagttaaatcccaagcatatcgccagttcggtatgaccgtgccttacggcaacacgaccactcttgcttatggcttaaaaaccaatgcaacgggcgcagtaattaattccgacgcgactgctgctttagctgtcggtgatgttgttgatcttggtccattgccagaaggcatgcgtcttgatgatgcgttattggtcgtcactgctggcatgaccgcaactgttaccggctcattaggtttcgcttatgaagacggcgcagatagtacagatgtaccgcaggatgctgcttactttggtgctgatcttgaccttgctacagcaggacgcgtgcgctccacaggttccaagctggtcaagctaccaaaacctgcacgactcacattaaccactgcagcagcagctaacgctaaagcgagtgacattaatgttctagttaccggtgagttactaggcgcgctataagcggtcagggctggctggtattaccggctagcccgttactggagtgagtgacatgaaagttcttattatcggtattgctcaagtagcgcacgctattaatgccgcatattgcaaagcgcttggtgatgatactcaagtcgattgggctaacgcacctgaatggcagcagaagtctgctatcgctggcgtagaaatgcacttggcaaaccccgatgctacgcctgagcagtcacatgagtcgtggctaaaacagaagctcgatgaaggctgggtatacggcgaaacgaaagatgtagaagccaagcagcacccgtgctgtgttccttacgctgatttgccagcagaacaaaaggccaaagactacatttttcgcgcagctgttcatgcggcaaagacactagctgactctatgcctaagccgacacaagttaagccggttgaagtcgccgcgcctacaggtttctctggcaaggttatcaacgtgcaatatgttggtgtgcgcgaagaatggctagaccatacctacagcacaggtctgcacttcacaaaaggacaggttcgagcgatccctgtagtgatagccaataagctattgcgccatgctgatatcttccagcaagccgaagatttgcactcacaggatgatgaagaaactctaatcctgattgaccaagcacaggataaagcagccgaagaggaggctagcaagcaacgtcactacgatattctgcacgaagtatcaaagatgaaccgtgacggtttggttcagttcgcagctgaacgctaccaagtgaagctgaatggccgcggcaaagctgatgatttgcgtgaagaagttaatcagctagttaatcagtacggtgtcgtatgactcttcagggcttaattgcggcattccgcgtacaggctaacgataaggttgagccttacttttggtctgacgaggaagtcacgggctacctgaacagcgctcaaagcgaggcggctattcgtgcgcgcctgatctatgaagttgccgatgtagacgtgtgcagtattgacgtgattaaagaccagtcaatctacaacctcaatccactgctgtacgagttgtcgcatgtctcattcaaggcggacggcgagaagcaaggtaaccgtatttcaatcatgtcgcccgaagatatgagcggcctttgcgctggcgattggcgtgagcgcacaggcaagccgcgattcgctgtacaggccgacaagtggttaaggcttgcgcctacgcctgattccgacgggctgctgttcattgaaggctaccgcgtacctaagccgatggatctagtcgatgcagatactgcggcgcctgaaatatcagagctacaccatgagcatctggtcaactgggcgttacataaagctttcagtattcccgatgcagaaggttttgatccgcagcgcgcacaagatgctgagcgagactttaccgaatactttggcatacgccctgattcagacttacggcgcattactcgcgaagatgtgccgcataccgtggaggcattctgggtatgaacaagctagcaattgacctgaaggttggcgaaacgctaataatcggaacgtcatctatccggcttgaaaagaaatcaggccagttggcgcgcctagtaatccaagcagataacaacacgccaatcacaacacctaaaacagcgcgcatgagtgtgctccaagaaacatcggagagtacacatcatggctaacacgctattcgacttcgcacgtcaacgcttccttgaggcccagctgaactggatgaccgacaccatcaaggtgatcttggtcgataccggcgcatacacaccacagacagcagttcaccaatacctagctgatattcctatctctgcgcgtattgctgggccagtgacgctaaccagtaaaaccactacaggcggtgcggcagatgctgcggacgtgacatttaccagtgtcacaggcgcatccattgagtcgatcatcatctattcagatagcggtactgaatcgacaagcccgttgattgcctacattgatacagcaaccggcttgcccatcacgcccaacggcggtgacattatcgttacatgggataacggcaccaacaaaatctttaaagtttaatgcgcagcgcgcaggagtgcggcatgacaaaagccacaaagccaccaacacaagtcgcaggcgtagaaggtattgcgcctaagcctatcgtgctcacgcctgagtcaagcaagattgattgggcgagaattatccaattgccgccattccaaatgtttgccgtcgagcgcgcgcgcaagtctgccgccgacgtgatggcatggatgccggcatgggcgcgcgagcacgagagcgaacaggcgctgttcgacgactactgccagtggcacaaagaaaagggctactggccagcagagacgccaatgggcgaattgatcgagccgtaacgagaggttatttcatgccacacatgccaggaaatggcgccattttcggcgttatcagcgaggacggtctagcaaagactggcttccccgtgagccttgttgatagaaccacgggtaaactggtgagccgacaactgtctgacggaaacggcgcgttcgcctttaacggcctcaaccagaacaccaatgactatcaagtgattgggcaggacgaagacggcgaaacgtacaagaatgcggtgattcgtgaccgcatccagccagtgcccggataccaaggcgcaagctactggggcaactggcgctacgctgcaatccagtacggcgtccactctttctatgacgggcagttggcccacaactatctggaagacacccagtctgggactgtgccgtcgtactcggcgggacaagcaccgcgattccgatattctcctaataactcgacaggaacagtaacgaagccagtcatggatgtttccatcacacagggagacccgagcattccggccactacgtttgatttgagcacaatgacggcctacgggatgacaaaccccgcaggaaccgtagagatcgacgcatttggaagtcctgcaaagaccgcgctagagctggttgctgacttttctacactttcttcggagtctgggtgggcatctttcactcattcgttatcgcacgaaaacgaagacccgaacactggaaccaatgtaccccatgtaattggcctttactacaacatctccgggaaataccttcgcattcaggttaacaacaccggcgattaccatctacgggctgaacatagagtaaacgtcggcgacttctcaatggaggagtatcaaggcgtacatcatgtagtggcctccgctgtgttcggcgaggcgcttaatttgtacatcgacggcgttctcgctcatacgttttctatggtcggaatgtcagccgctttgcgttatagaaacaactccgcttatggtcgagtaggcggaacccacatccatggggaatacaaccaaacctctagctctaatcaaggcatacatatcgcgcgtggaatttctggaaaggtggctcttctcgcttggtattccaatgcgctggatgacgttcaagttttggacttacaccaaagcctaatggtcggggctgagccgaagctaacaggcttcgctaaggaagttttcgcggaccaccccaccttttacgtccggctgaacgagccaactggaacgactttcgttcgggacatgctgcgcggccatacatccgacgtttttgccggaagggtctacggcgagacgctcatgttgcagccctccatcgtcgttggcggcaacacctttgggtttaacggttcgtcatccgtgcgctttaactacagctccccgtcactctataactcccaagggttcacggtgctgtgcgtcttaaagccggagttggaaactccagctgcgaccgagacactgcttagatgcacaaacactagcgaggcatacaatcacggtgtaatactacaaaggctggtcaatggatgtttaggactgatctaccgcgcaggcggtttgaacgaacagattgatttcactgtccctattggcacggagtccatgtgcttagctgccattgcgattgacaaagttgccttaactgcctcgcttttcataaatggcgagttagctgagcagcaggttattgttggatcgtacatcgaccgaccgccaagcagggtatctaacgccatgtactatcaggcgatgattggagggatcacatcggatactgggggcataacatccccttacagaggacttctcggcgaacttgctgtcctgcaaaaccctatcaccgctcagcgggccaagcagatcttcgacgccacgcaggtggtgtaaatgacattcctcatcaccggcgtcacgctgggcgatgtcagcgcgacaggtgatgattcttacgtcagcaatgccgctgacttagttcttgtggcgtcatgggatagtgcggctatacctgctcccgtggtgtcaccagacgtctcaggcgctttggtttcgctggatctctctgaatcctacaagtcgcccgctggctctgcagtttcactgacgctctcaggagcgccatttgtctacgctggcgctgtggattccgcgcgattcggcattcctaccgcaggcaatgctgcgcaggccgcatatcccgtaggatgggagtcttttgcgtatgggtttaccactcgcgcgacatttgatctgagttcgcgcgagctgccgcttagcatcgagggcgcctacacctcgccgactgcgctcaacgtggggctgtatctggacggcaagccgttagtgtcggctgcctccattggtgatcagacggagttcggctctgcttcggtggaatcgccattgtcggcgcgtccatttggctttgatgcctccgaccactctattccgcgcgtccaccgaggcgagacgggcgcgcgggtagagctgaggctggatgctcactatcaatcccttcatgggtcatcggtcagcctgccgctatccggtgcgccgctggtgctggcatctgcaggtcttcagcagttgttcggcctgccgtcggtggccaacgcatcgcaagcattctaccccttcgggttcgactctactggctttggctatcgcacacgcgcgtttcgatctgacttagatagtggaaacctgtctctcagtttggagggcaactacgcccctcctaacgctgcggccattcagctgctttgggcgagcgagtcaaagacgctttcgcccttcggcttcacgggcttgcagctcggtgagcctattgttcgggttgctcagctctttcttgaggggatacagccgcctgcggatgcggtaccggctccgagcctcaagaacctcaatcgcaccgtctcaccactgggcaccgactttcttgagtctggcgcccaccactcggttgccaatagcggtgtggcggttcgcccaactgggatttcgcaccctggacttggcgctcatcgaatctggaactggcgtcaataccgcaacatgcagggcttcaacacggctctgtatgggcgcccatacctccaaggtggtgttaagtacatcacgccaagtggtgtcagcacgactgtctatggtcgcccgtctgtcgtcaatactacagccgatcagtttgtcagccttgctggtcggatagctcctccatgggctggtaggcccgctgtatctccgcgcactgtgttcccctatggcgtactgggcgctacattcggatcagcgttcgtacagttcccgccaaggccggtaggttggttatcaagcgcgtttggctatccggttattgaggataagaccaagtatctagctgctggagggataggtgctgatgaccagtacggctatccagtagttttcgatccaacaattaaggttcttgtttcgtccgttattcagtcgggcgtgtttggtgacacggcagttaagaacaaccgctttgttctgaatgctgagggcattgatagcgcaagcgtttcgccttgggcaacgcttaggaacaccagaagacttacctatgcgagcggctggcgctcacttgattttggcgagagcagtgttaccaataaaacgccaagcattgcaccagtaggctttgatgcgctaagactgccgaacccagcagaaataggtatcagctacgcagttaggttgatctacacaagcgggatcaacaaaggcggcataggtgtcgcgactctaaccaagacgccagagattgcaccgaaaggcatagctgcgcctactttgggtttgacgactgtatggcacagagtaagaacactagaagttcgtggcgcagacgcatacaagtccggcagtgcagatgtttggtttaggtatcgcttcgtacagctacaagatcgcggctggaacggctcagcatacggcgcgccaaggctagaacacgaacacagggctatcaatggtctaggagcagacagcctaagatcaggcacgccttatatcgggctgagaaatagaacgattgcgcctgaatcagcgtgggaagactttgctacaggccacatggttggtggtctacggttcttgcgcccagttggatatgaggctacgcgctggggtacgcggatcattcctgaaataactcaggtctatgtaagagggttttcaaacagctacggcatacccacgctgaggaacaatactaatcttatccttccggcaggtatcacgacaacgcctgatccagtagatcaatggggaaccgcaaaactccacaacagcaggcagttcgtgtcaatgttctatgacgttgatagcgaattaaaccctcctaagtggtcgcagtggacgctgattgagaacaggaataaatacttagctactactggcaacgagatgttgcgtatcggtagatcagtagtcgccaatgctgctacagcagttatcccctccgcaatacttgcgccggagtggagtaaggcgagtgcttcagggatggtcgcgttccgtataagaccgctaaaccttgactctatcgagccgccatacttcagcgggtggctaaatatatacaacgatgcccctgtgcttggatctaaaggtttcaatgcagagagcttcggcgtatcagttgttgaaaatacgcgcaggacatttaagttccaaggctttgatagtgcatggttcggctacccaatggttgcgttcaggatccggcacattaagtttgagggtcgctacacgattgcgccaccgcctatcaggatgcaagaggtcaagctgtacacacgctacctagatcctattgggtacgagacttacggttctggcgctcagtcgctaagtatccactggacgctaatcacaccacgatggactcatcaagacctgtttggagaacctagagttcataacgtaacacctgaagtgaaaacgcgaggcagggtatccgaagagttcggtaatgctttcgtgcgccttgaatggagagaactaatcactcatgaagcattcacgcagatcatccctaagcctatcgtggctttcagggatcgcgctatcgaagtgaatggcatccggtcaatggtattcggtgacaagctaaaggtaacgaaaacaggcgcgccaccttactcagaccagctaatcattcttgctaatgctgacgttactaagaacggttacgggattgaggtgcctaaagatcaggttcctaaaccaatcatgaatcaacaggttctataccatcgctctgattcagtgatgacaaaattcggatcacttagaattactgccaacatgattcgtgttgagccaggattccaagagcttagcgtaggtgagcctatggttagcttgaagattagaaccgttgaggttaaagagtttccaggagatcagatttttcagccatcaaagccgcgcctgtcacctcatacaatctgggctgtgaaagaagcgcctgcgcaagctaaggtaaatcacacctcttcttcattgcactatgttgatgaatatcctggcagtggatggagaaagggatttggcaggccatccgtgtttctttataccggacttgttaatacaagaggggcaaaccatgctgctgtaggtaagcccagtgcttataacgccttgtcttatatcaggccgaaaggcataaaattagaccgttatgggtggcacacagtacctggcgagcaaatatctgagcagatcaattcatccgatacaatggtatttggtattacaaaagttggcaggccgccttatgttgggccacaaacaatagctgcgaagggtttatctgctattttttggggagctagcgacatacagctattacacaggcaaatctaccctagagggcacttgtctatggcaatgggtacaagacgtggaggagatagtccgtatatgtggcaagggttgagaataggcgagctgatgccgaccatacctgaaggtttttcagctgagctaatcggtgagccttggctttcatttagagttcgcgaagttaatcccgatgggtacgatgcgtttatatctgattacgacctaactgctttctctaggcgcatgaaagtattccgtaaagaagtacctagcagcgtagatcacataaaacctgaaggctttgatgcttttgcttcgagtgcttctgacgttaaaccattagcgcactttatccggcctgatggaaacagcgaccaatatcgtaaaggagccttctaatggcagatttaccactgatgccgcttgccggtatgaacaatgtagctgaagaagcagccttaatgcgtggcggcgactcgccagcagtgtttgcgcgagacgttgtgaatatcaatgtgtcgccagcaggaaaggcaatgctaagagactgcgcgcaccgcgttagcacgctgaagatcagggagctatggcaaagcccgttacatcgagagtcgttcggtgcggttggtgacgagtggggaaaggttggcgcattaagctggtcgtttgatcctatggtcagtatcggtaacggtccagtgtcgcatgaagtgttgaacaaccttgtttgcgtggctggcgactccggcatatttacctatgacggcagaacttctcaaaagctaacgattgaaaacccacccgcaccactcgtgataactggaagcggctcaatggttgctggtatgtacggcgtgtcggtggcatggcttaggggggctaccgagtcagcaccttctgcaatcgcgtttacggacgttcctgatgaaggcggtatgcaaattattctgccgatgtgccttgatgacagcgtgacaggtgtgcggctgtacatgacacgccaaaacggtggagagcttgcaagagtcggtgattaccagattgacgcaacaaccgttgatattccggctttgcctaaacttggcgcgccaccgcagtttcttaataagtcgccaatgcctacaggtaagtatctgaagtattggcgaggccgtctgcttacttcccgcgccaatgtgcttcgcttttctgagtctatggcctatcacttgcacgatgagcgccacgggttcgtacagatgccacagcgcataacctttgttgagcctgtggatggcgggatatggattggccaagtcgatcacgttgccttcctcgaaggcgcaacacctgacgagcttgtcatgcaaagaaagaccgcttgcgcaccagtggccggtagttcaattcaagtgctggccgacacgattggtggcgagctttcacagggcggatctgccactgtgttatggctcgcagagaatggttatgtagctggcacagcaagcggccaagtggttgaaatgcagacaggcgttatgaaaggtatcaccgcagaaaacggcacttctgtagtgctggatcgcagagtgcttaccgctgtaacctagaacaagttggcgtaaagcctttttttaacgctgcgcaagagtgcggcataggaactaatggagtctcctatgaccatgcacgaaaaaaatgatcaacatgaagcagcgtttgccggcgcattggccgcaggtgaatactacgaccgagtgaacggtggcgaatgggtgctcaatcgcaacctgctgcccactgaaggtctttcgcatattctcaacgtagcgcttggaaccacggcaaaacctgcaagctatcaccttgccttgtttagcggtagcgctgcgcctgctcctaactggacagctgcaaactttgcctcggttgcctcggaaattgtcagcatgaccgaaggctacacaagcccaacacgcccagcatggacgccagtgaacactgctacaggctcgattgacaacatggtcactgtggcatcggtaactattgcaactacgtcacagctaaacgtgactggtgcggcattgctgactaacagcactaaaggcggcactactggcgcgctaatttcagcaagcaagtatgcagcgcctcgcgtgttccaagatggtgacttgtacgagattggttaccgcgtgagcttaacggtctaagccatgcacgaaccacgccctcacggcctagcggctgtgggcggcgagccaacagaagaagactctgcagcggtagagcttctggcgcgccgtctaacaaacctacgaaatctatcaggcgttgacagcttgaggatggttcgtgagttaccgagtggcggttacgttatcgctcaaaacatgggcggagttttcaaggcgatcacacataagccagaaacaccaccagaaccagaaccgtttgacggcattgctaaagattacataccgatgctgtttagcggcgttgttactaaggctgttcttcgtgacgatgaaggtcttggcataaagctgactgagcagtgtagacggcgtatcgctggatacaaatctaaaaacttaccggcaaaacaagttgagctgaagcgctttagtatcgaatatcacacaatgtgtgatgaattaaagcctttgaaccttggtcctttcaagtacacgcagtatgttgcacagaggccaacatggtacagcggtgctatggcagaggtaatgcagatcgttggtggctatggcaggcaggatctggaagatctgccagacagtcggattgagagatctaggcttgcactgcctaataaagtacaacggaaaattgcactcgaccttgggaatttaagactaccagggtataccggattacctgacaaaaagggtcagttcaggtacgactacaagttcaacaatacaaatggagttggctttgacgagctgggcaagccttggctgcttagagttagttcttctggcgtacatgcgatgccgctaccaatagttccagcaacaatcactaacgcgttcagagagtggattgaagaagttggggacgatgagattctgaagattcttgaccgttttggcgggatgccaagcggagagggttttcctatcttatctaaagactttgaggcatggcgcagagctggtgtgattattaaggtgtgcgatacatcggacttctatcaacacatcatgtattcgagcgctataggctggtctttcaatagcgaaggatctgaaggctataacacttgttacgactactacgatgaagaaggcttaggttacggccttgcctacaaaatgagccttacgcttggttctgcaaagaacagtgggaaattgccgccatcattcgaccttgattcatcggaggaggcaagaagacttgatgcgtaccttagcggtctttacaggcagatgggtgacaacgattctgagcacttggcgatcaagtataagttaaggcgagtgcccgtgtccgagatattggcgcgcgctcgtgagggcgtttcaggtaaagccgagcttgattactggaatcgaaaagaacttgatccaatagctgttcattcaggaagtgtctcagaagtgtctaggggttatctgtataacggcgcaaagttcatgtttcagccgcagataaaataccctgagcctttcgctggcggttgcgtatcccatgacttcctaccactaatcaacgggcgctataaagagtcgtacccgaacagtgacacaataatgttcggctactacgctggcgatgagttaaaggttgttaagtatttcagagagcgcggaagctacaaaaaagaagttgatagtgattttgaagagtgtatgaccgttggctcatggactgaagtagttacccaaggtagcacgcaaatactaggcaatttctacacaagcgacattgatgagaggcaagaggtcgcagacaccactactactaccaagataagaggcatagacaagggttacgacagggagcctgctttttcttttgacgctttcttctcgatgtgcggctctatgtggcggaataggtactttgagcgccaaactgagacgttcaggacagaaggcaactggctagaagtagcggtttgtatcccgtatctcgataggaatgcgctaatacatgctaagcgttcaggaataacaggatcgctgaaaacaacgggtaacagcctgctatcagtaagggaccctaatagttataggtatttcacttacgattttgttatgcactgggtaggttgtagcacagagggcaatgctggctacgcccctaacgtcaatccgtaccctagagacggtaaccctgtttgggtgactgggtataactataatcctggtggttgctccgactttgctgatcagggcgactgggtaggagggcttccttctgactacacatggcttattcatcctaaccgtaatgagtggcgctttagtggaggtggtggcgcaccagtaattaaaaggtactcgacaagcgtaaaaggggaggcgaaaaccgaaggcgacttgaagtatagcggcgcttcctctgagcagctaataaacaaggaaatcccaaataatatgtatttccttggatcacccgatccttacgttggtgtgttctaccgcgatggctgcaagaaccagtttggcgactctgaatacgcaaacatttcggaacctgagtctgctggtagcccatacagaaagcgctgggggcatagctcgttggtcgataacaagtcagcgcaccactttataggagttatcaatgagtagttatcgcgatgattcgcatgatatagcggttgcaagcgacagcacatgggtaggcttgaccagtattattgaagatacggctcaggcagttgctacgatgatcgtgtgcatcggtgttttgcacgctgatagcgcggtggctagtgaccaggttattgaccgttcaagtcacatgattgtcgagcaggcgcaagcaagcgataccgtcaccgatcaccttttaagtaagcagcttgttatcgaaaaggcaaaggtaaaggacggcgcgacaggtaggcttcgcacactgctagaagattctgcggtcgcttcagatcttgtgtttgacaagcagctcaacatcatcgtcgagagagctacggcatcggacgaggtgactggccagcggcgcgctaagtctctagtcgttgataaggctcgcgcattcgacacattggtcaaccgttcaagcgtgcttattgaagacgctgccactgctaacgactgggcagtcggaaagctaaaacgcaaagaccttattgctgaaatcgctacggctggtgatttggttgtcgatgaccatcacgctattgcaccagttattgttgatcgtgctcgcaccagcgatgaagtagttgatcgactttacgccaaagacctgatcaaagaagtcgttgtggtcgaggacgaagccttgtctatcggtggcgactacggccaggcatggacggcaaacgctggcaactgggcaatgagccgctatgcgccttactctttccggcgcttggcggttgtcgatggcgttctctacgggcttgctgatgatggcgtatacgcgctatctggtggcgtagaagagatccaaggcagcgtgactacagggaaacttgacgttggcggtggtggcttggttcatcctgtatctgcctaccttgagtacgagcttgaaggcactgcagaaatggacgttaccactacgcaatcaggcttggcgcagacattcacctacccactcgctgcagaggttgcaaacgaattgaccaatggccggtttatcttcggtcgtggcttgcgtggccggcactttagcttcaccttgcgaatcaaggggcttgccggctacataaacgatttaagcgtgacttccacgcctacgaaaaggagagtgtgatgggtatcgcaccggatagtattcttggggtggcggttgataccgtcactagcaagatcaatgacctagatacgcttggcagcaagtacagttcgctattacagaagtcacttgtagatattggcaaaataaaggttgctgatgttgaggccccgctaaggcttcagccgccagaagcagcaccgccacctgtgacacttggaccaatacctgattacaatccaccgcctttagcgctgccagctatgccggatgggtttagtattgatgacctgttatccggccttgatattggcgacatggatgccatgccggacgcgcccgtagcaataccgataaacatacctgacgcgcctgatatggctgcaattccagcaccagatcgaccaacaatagatacgaatgtcgaaataccggacgcaccaaacattgtcatgccggaaatggaggcgcttgagcagatcaatatccctgattttgttttccctgagctacctacgtttgatgctacgcctccagacgccagcactataagggtgcctgatgtttttattaactggtctgagccggtctatgcgtcagaggttttagacgatctaacggctaaagttaaaaccatgatggctggcggtactggcttgccggctgccatcgaagatgctttgttctcaagggcacgcgagcgtgacagcgcagaaacaacaaggtcagttcaagaagcggttgatacatgggctggacgtaacttttctatgccaccaggcatgctagtgaaagctaccgatgtagcgagagagcaaggacgactcaaggcagctgaacttaaccgtgacattctggttgaggccgctaagtgggagattgagagcatccgctttgccgttgagcaaggtatggcgcttgagcagctaacccagaacctatacaacaacatggctaatcgcttgtttgaagtggctaagttccaagctgaagcgcagatccgcgtattcgatgcgcagataagtcttttcaatgctcaaaacgaagcattcaaaacgcttggcgatgtgtatcgggttaagctggacggtgctatagccaaacttacggcctacaaaactgctatcgaaggtcaagttgcgcttggccagatcaaccagcagcgtgttgatgtatttaaagccaagctcgatgctgttcagtcaaacgtagaagtctacaaggccatgatgcaaggcgctcaggttcgggcagataccattaaaacccaatttgatgcgtacaaggcagacgttcaggcattcgcagaacagatcaacgcagagaaggttaagtttgacgcctatgaaagtcggatcaagggcgagcaggccaaggccggagtctatgactcacaggcacgcgcttacgcctcaactattcaggggcttgcaagcaaggcagacgttaaagtaaaaggcgcacagctcaagatggaggccgcgcgagttaaggtttccaagtttcttgctgatgtggatgcctacaaggcgcagcttcaagcaaaccttggtgaggtgcaatatgtgacaacagctttcaccgctcaagtggacgcatggaagtcacaagcaagcgccaacgtagctgatgctgaaatgcaaagccgctttgccgatatgaatacgcgcaccgcaattgcttactctgaaatgcagatgagcgagtacacggccaagatgacgaacgcggtacagcaggcgcagattgcacttgatgctgcaaaggctttaggtcagtacaccgctcaactggcagcaggcgcaatgtctgcagctcatgtgtcggcaagtatcagcggcagtggatctgcaagctcaagcgactcaagaagcactagcacttcgacgagccataactacagctattaaccagcaataatcctgcaggttaacaccctgtaggattcgcaaccaagttccgtagcagacaacattaagcgcaacagctaatgctacggagtcatggttatgcagggttttaagcctcgtgatcagcgagataatcagtcaaaaaaacaatcaaaacaaaagaaagcaaatcttggctttgcgaatggcggcatgattcgcggccccggcacgggcacgtctgatgatattgaagccgagatgcctgctggctcttacgttatgcctgctgattcaaccgagcaaatcggtgaagaaggtttagccagcatgggatcgccagctgatgtacgcgtatctaatggcgaataccagttaccacctgagcaggttcacgctataggcgtgcaagcacttgaccagatgaaggacgctacgcatacaccagtagcgcaaggctttaaccctcaagtcaatcgtgatggtgagcagttctttaatcagggcggtgtcacgcttggtgatgaagaagccaagcgaaaggcagcgcagatgcaaaaccagtcaccgattgcaccgccgcctcaatcatcttcaccagcagcaagcactgaacaactgaatgccgaaagagccaatagattaggcgcgcagaaagaagctgacacagctatgcgctcagagcagagaaaggcaggcgcgagagctattgagaacactaaaagcaatgtatcagcagcggttgattctattgggggttttgttggcgatacatataagaacgtccttaacgctgcgacagttgtaccaaggacagcttatggcatagccactggagggatagaccctcaccagcctgctaggcacccaggcgcagatattgttgatgctaacaaagcaaaactagccgagcaggcagctttgtcgcagcagcgtaaccagcagtttagcgccacaatgggcggtgctcaatcacagatggatgcagtatctggtttattcccaaatcaaaaaccagcagcttctggtacgccaatgcaggcgcttgaagccagccaacctgtagctgaaactggcacgccaatagcgcaagaacagtcaggccaacaaccagcaagcgagcagtctgcagcacaacagtcagtaacaagccaagagccattacagccgcagaacgctggctttcaggctgagctaaacaacgtaaccagagacggcaatagcttcagcggtggaattgttcgccccggctacacgataaacggccaagctcaaggtggcgtaaacgtcatgccagcagagcaaagcgcacagaacaaacaggctgttgcaaatctatttgagcgcacgccagagttcggcaccggcacagccccgatacagcaacaagcacaaggctttactcctaacggtggtggtggccaacgattcacagttgttggtgacaactcacggcaggatgctgattacagaaaagcattcaatgccgcaagcactgcgcaccgtggcgctcaaaacggccagctaacagcagcgcagttaaggtcaatggaaggcttaaccaaaaacaaatacggcacggcagacgcaaatcaaagcaacgcaacttcgcgtgcaaacagtgatagcaccaactcggcaaatatccttcagacaaatatgcgtgaggcaggatcagaccgtagagcctcagctaccaacaaccttgataaccgcaggctggatcaagccgaaagactttcagcgccacagattcaggcggcagaagaaaagcagagtctctacaagcgctttaatgaggctgaaacagaagagcagaaaagtgaaatccttaaccaaatgagaatactcaacggctctggtggctcacaagaaaacctaagaaacaacttcatgcagcttggcggcgggcaagaaatggtagacggcgtactgcgtaatgttcctcagcgactcattgatcttagaacaggtcaagaagttctagggggccagcaagagcaaaagccagacacgaaacgctttgagaaaaacaagatttaccgcgacaagagcgggactcgattcatgtgggatggtgaaaaggctgttccagttaactaattgccgataggtattaaataatgagctttgaagttgatttagacagcgctgttcttgagggtgattattatggagatgatactagggtcaagcctgagagcagcagttcaggctttagccctgaagcaggtcccgcaaagcagccagctccctttagcgttgacctagaaagcgctgagctagacgaaaaagccaaccagggctttattggaacattagctgacggtgcaaaatcggcaggtagagccattagctctacttacaatacttatactggcgatggtcaagcagttgttgataacgccaaggctcaagaactggccaatgaagataaaagccaagacattaaaaacttccagtctgactgggcggcaaatacgggcgcaggtactgatgacgaagtaggcttatggggtgctatcaaaggcactggaaaggcaattattgataaccctcgtggtgccgccctttcagtagttgagcaattccctaattcagttccagcactggccgcaggctgggcaggcgctaaaggcggcgcaatggcagggggcgcagtcggctcggcttttggtggtgtcggcgctgggcctggcgctttaattggtggcgccgcggggtttgttggcggcatgttcctcggtaatacgttgaccgaaacgggccataaggcgcaagagtacgctgccgatggtgagttcacgccagatgagcagtcagcagctattaccgagggcgcgaaaaaagccggtgttattacagccgtagatgcgcttacctttgctgtcggtggcaaggtttctggatactatcggaaaacagcagagtcaacagttgaggcagctactcgcaaaacactgcttgacgctggtgttgatattagcgatacagcagcgcttactgcggcaagaggtagcccacaaattgcaagccaagttgttgaagcgcagaaaaatgcggcaaagattgcagacaatctacgcaagcgcgcaggcgaggcaggcgcgctacttacaatggaaacagtcggcgaaggcttaggtgaatacttaggcgaactggcagcgactggacaagcaagcgtagcagaggccgtgctagagagcttcttgtcgctaggtcagtctggcgttcagtcgatgtttaactttgccaaggcgcgagagcgttcgctcactgaccaagaatggattgatgcgtcaaacggtattgcgccagaaggtatggcaccagagcaaatgccggttgctgatggtatatgggataagccaactccagaagccaagatcgacatggggcagatgcagggtggcggcgtaacaccgacacctgtatttgacccgcaagacattgatcgcaaccttgcaccgacaccatcgcagcaaatgggaattaaccctgatgctggcccactttctgctgctgcagcgcagtcagttgatagtggcttgtttacaggcgggtttaccccacaagccggaattaaccaatcggcacttgagcgcgagggcgtaacgccgccgccagtattagatactgaccagattgaccgcaacttaggaagtattgatccattaacaggtgagtacatgcctgcacctgagcagttaggtcagtcgagtcaagcgggaggcgccggtaattatgagtatgaccaatggggcaacctaagcagcgttgatggccgcacagtagatggttacggtcaaaaccaaccacgccttggttttaatagtaaagccgagcgcagcaccgcgccgttatatgaagttgggcctgatggtgtggcgcgtccatcttcaggagaggcggcgcggagtagaaaagaacgtattgacctatcatcgctgaaaggtagacagcaaacccaagcgcaaaaacagcctgctgctatgccagagcagcgtagtcctgaacagcaagcgcaatctatctgggattcaatgaatacctttgagcgtaacgctgcagcagcaaatgttcttggtatgcgcggcgtaccggctaagaatgcagccacaaaagcatgggataagctaagctctgaacagcaggccaagctcgtaactggacttgagagccagcaagggaaacgctggatagaccctaatcagaaagtgactgaccaaactggccctgtgctacaaaaccgcgaccgcacaagccaagactcaatcaatcagatgcgaagcatctcaaacaatccagactacagcaggttaaaaacatcaggcttcttgtctgacggtgcgcctgttgttgttgatgagaatattcaaataccagcgtcacagatgggcgttactgatactgcttctgcaggaaacgagcgctttaacgtgcagtacgcagtagttgaagccgaccagttaatgaccagtaacagcattgacggtaccactaacgctgaataccagacaggggctgcaggtaaggctagagcaattgcaggtaatggacgaatcactggcttgcaatcagcatgggctaaaggcaacgccagccaatacaaagccgatatggcagccgatagaatgcacggcattgacccggccgttattgaaggcatgcgcaatcctgttttagtccgcttattgccgcaggatcaggtcactgacaatattggcgacctaagcaacagagacgagaaaggcagactttcgccggtcgagcaagccaaaacagatatgggccgcattgaccttgatagcctaaagtttactgctgaaggtgctatcggtggcgaagcgatccaccagttccgcatggctcaacctgcagctgagcgcgtgagtgaggcagaggcacggaagcgactgacttctgctgtcttccaaaaggcatacggaaacgatcagcttacagaaatccagtctggtgaaagtgacgatgccaaatcaatcttatcagcactggcacaagcagccccaagcatgtcacgtcttgaaggagctggtgagtttgatattcgcccactaatcacgcaggcaggcattgcggctgtaaacgcagcgcgtagaggcactaaacttgctgattatgttcagcagtcagaaatgggtattgatccaatggtatacccaattctggaaatgatgctgaacgagaatggcaatatccgtagtagcaaatacatcggcgaacagctaaccaatatggcaaagttggcttatgatgaagccaactcacctagctcagatatgtttggcgaaaaacccaagcgtacagctgagcaggttattcaagacgcgcttactggagtacaaggttatggccaaatcaatgacggaagagggcaagaaagtctggggcagcgagggcggtcagaacctgatgcgcaaatggttgaagggccagaaggcggacgagagcgaccagcagacactagacaaactgcaccaactcaaccagaagcagagcaagaacaacccgcagcagtagaaagcaatgcgcctgaaacatggcgcagtaactacattcaagccgccaagattgcacgcgaaaaaggcattaatcctaagcagcataaaaaactcgctgacttggttgaagctattgatgcgtcaaacactaaacctgaagctcaaacacagctaacagcacaacagaagcaggcttcaggcagtgtagatggtgcaaaagtccatcttaacaacagcattgacctaaccagcgcattagctgcaatcgcacgcggcgcacaattaagcaccgagccaaacggtgacgttattcttagtggcaccaagataattacgcttccaaagccgccaacttctattgatgaagttattgccccgttagccacagccttactagaacaaatgcgagcagatggcgtttctatgcctggcaacccagcggacatgacgcgggatcagtttgctattgcctatcactttgcaaacataattccagagtttgaaatcagcggagcagatattggtggcgtagtccaaggatcaagccgtggcttaacagtagactcagacaagctatacgacaagatcatcgagcaagccaaagagcaggctaaaccagccttggagcttaaccagcaaaccgaagaatccttagctaaagatgccaaacgattagagcagctgcagaaagaagaagctgcgcagaaagtcgcgcagaaagctgcagaaaggaaacagcgtgagcgtgacgcagacaaggccagagcggacgaagtggttgatgacttccagttggggcagtctgcagaagaagtaatgtctggcatgggtgatatttttgcgactgagagcaagccagcagataaaggcattgcgtctcaagccgatgacagccatgtcacagttgttgataaccaatacaacccaaaccctacagaagcgcagaagcaggctggcaactacaagaaggctcacgttaaattccaaggccttgatatcacagtagagaatccagtcggatcagtgcgcagtggcgtagatcctgacggcaatacttggtcaaatactataaagcatgattacggatacattaagcgcactaagggcgctgacggcgaccatgttgatgtgtttataggtaaagataccgaaagcgataaggtatttgtaattgatcagccgcacaaaaacggtaagttcgacgaacacaaaatcatgctcggctttaaagaccagacgcaggccgtagaagcgtacaaaggcaactatcagaaagactggaaagttggctctgtcactgaaatgactgtgggcgaatttaagcagtggcttagcaatggtgataccaccaaaccggttgagccagtcgcgaagccagcagcgcaaacaaagccaagccaagccattgaggactttggtgagaggctggaaggcgcacgcaaggattacgccagcaaactatctgacgctaaagaggtagacattgcgactgagccactatcaaagtcttggccagagccgaattatcagaagttgattgacggaggaatgccgctagaaacagcaagtattgttcgtgctattcgtgatgagattccagtgaagccgcgcgcatcatggcgactgaaaggatgggtgcgacaagtaagcgaaatgcgtgatttagccttgaatttgatgggggaaacagctacagctaaagtgattgtagagcagataaaatctaataaatctttatcagacatagtgaatcgtgcagacctgtactcggcagttgggcacgataaaagcctaaaagatattagtttaaaacaaagctcttactcgttgattgatggtgttaaatactcgccaccgaaagagctctggacggttgaaaggccgattaaaagcagcgtaataagcaacatgcccagacgtattgcgacagctgaaacaagagagcaagcgattgccaaattcaaaaatgcgtatgcaacattggacgaaagcaaacgtgtcaagaacaaagcagttgagtttggggtttatacagacagaaccacaaaagatgttttcattggccggaaggttggcaaaagtattgctcgcgtaaaaactggattcgaaactgctaaagatgcaattgcacacctaaaggaaaactatgctgctcttgaagagcggtttaacaagatgaaggatacgcccgatcatcgtaaggctgaaaactcacctagagttggcgttgatcaccgaaatggcgcggatgtaacaccggagcagttctctgatacgttcgggttcagaggggtgcagttcggtaactatgtagagcaaggacgtaggcagcaggatctaaatgaagcctatgatgcgcttatggacatggctggcgtgttaggtattccagcaaaatctctatctttaaatggtgagcttggactagcgtttggtgctcgtggtaagggtggaaaacaagcagctaaagcgcattatgagccagatcaaattgttattaacttaactaagaaaaatggcgcaggcagccttgctcacgaatggtggcatgcgcttgataactattttggccgcgagcgtggcggtaaaagcaatgaaatgtatgcctcagacaatcgagctcacgcgacagtcagacctgaaatggcaaaggcttatcgtgatattgcaagcgcagtaagccgaaccaagctgaagtttcgttcagacaagctcgatagaatgcgcacaaaaccatactggggtaccggtatagaaatgactgcgcgatctttcgagagctacgttattgagaagctgcgtgatagcgagttatctaatgattatttagccaatattgttggcgaagattactggaatgctgcggcagcactgggcattgaaaaggatggtacttatccgtatccagaggcggctgagataccggaaatccgcgctgcgtatgataacttttttaacactctagaaacaaaggagggtgaagatggcaatgtcctgctttttagctttgcaggcaagactgctcgtggcgctgatcttatggcgctggatcaggctcagttgcgcattgcttctggtgacaacgccgagactgtacgccaagaaacaggttggcaccgtggcgatgatggaaagtggcgctttgagatcagcgatgatcaagccaagctgcgcgtagctggtaaaaatgcaggtgagcttattgactcagccgcgcttgacgcgatcaccggtggccgcaagttcccagtgacttctgacctgatcgaccacgctcaactatttgttgcctatcctaaactaagcaatatcaaagtagagaaaatgccagaaggcggtaccgctctagcgcgattaaagcgcagagctacaggcttcactatccagttgcgcgataacttgccacgcgagaaagtggcgtctgcaatcttgcatgagctacagcacggcattcaggtttacgaaggctttgccgtaggcggctctaagaatatggtcttcagtgatcttgatatgagtggagccaaggcgtatcgcgcacttgccggtgaagtggaagcgagaaatacccaaacacgccactctatgacgccagctttgcgccgcaacattgcgcctgagctgactcaggacacgccaagtgcagacgtgatcgtcacgttcaacggtaaggacattaccaacaaggcaattcctaataacgtcaataacgcgccgataactgatgcctcgctggtgcgagcgttcgatgtacagttccctcggttaactaaagctgtgcgcaccatgcttgcccgtggtaataagggcgagcgtggtggtgtggtcgtgattgatagcgctgatccattgatgattgcccgtgcgttcgccaagaaaacaggcaagccaatatcgcagtcggtgcaaatgttctcagacgctggtgtgatcaatggcttctttgatcctaagtctggccttaccttccttgttggtccgaacttgaatccagtcaccggcacagctgttttgcttcacgaaatgatccacggtcaacagcgccagaagatcgacaaggccgcacttgccatgctgatgaatcgcggcaaagagaaaaacgcagaaacacgagcgttccttgatcgcgtagctgctcgcatggatgatgctggcgaaacagcgaacgcacaagaggcaggcgcttacattgttgagcaggccgtaatggaaggtaagagcgctggttatggcactgcagacagccgattcctttcatgggtagaccaacatattggtaagacggtaggtgacttcttacgctcgttcatcggtaatttgcgcagctgggcgctgcgtaacggcttgcctattggtccgattactgtggacgatcttgttagctacgcaatggcaggtatgaagcaggctggtcgcggtaatgttgatggcggtgccgctgggttcagtcgtgacgcaacagctagcctagaggatgctctagcgaaacttgatgcgctcggcctgaagcatcggatcagcgagcgcaacgatgttattactgtgagcaagattgaggtgcccgagggcgctagaggtcagggcgctggatcatcggcaatgcaagccctgatcgactacgcggacgccactggtaagcacattgctttaacaccaacagccgattttggtggtaacaaagcaaggcttaaggagttctatcagcgctttggattcaaggaaaataagggtaaaaacaaagtttacgaagtctcagaaggaatggttcgcgaaaatccgaatgggcgcaccctatattcaaagggcatcactgaagatctagcagaaggccagcggcagtttgcacaaacagaaaatgcttacggtggtcgtgcagcctacgatcaggcaaaatcagagggcaagaccaagctgaactatcagcagtgggtgcaggtacgtacgcctgcttttaaaaactggtttggggattgggaaaatgaatcagaaagagttgagcgaaaaacagaaagagttcaggaggtggctggacgaaacactgccaaacccaacgccagagcaactcagccagctggacgagcgtggcgactggatccagaaaccggagagccaagaatcttctatcacggaaccaaagacagcttcaccgtcttcgacctagatcaccagaacagaaaggatcacggctggttaggtacaggtatttacactggaagcgataaacttttagcagagtcatacgcaaggctgaaagatggctcaggtgagccgcgagttatggagttttttgcaaatgtaaggaacccatataaggctactatagaagataagcagcggggaagatttgctgatagagcttacgccgacagagttacagaaaagttaaaagaagctggatacgacggtgtagtacttccgttcgcagatggcagtgtcgagctggtggcgtttgataagccgcagatcaaatcagccaccggcaacgtcggtacgtttagtgcagacaatgatgatatacgatttagctttgccggccaaaggtcaggaacagccgaccactactcattagggtcagcgcagcagcgcattgaatccggcgaaaatgcagaagcggtgcgtcaagacacgggctggcacaaaggcattgatggcaagtggcgctacgaaattagcgaccatgacgcaaaactacgcaagccatttccatctaagggccagctttggggtggagtttacgaaagtgtcaaccagtccaaggtgcaaagaggcgagggatacggtatcagcctaggcgaaatactggatcaccctgcactatttgcggcatacccgcatcttgcaagcctatctgtaagcacgcaaaagggtagcggtgcgtcatacgagtccggcagcccttccagtccggcatctatcagtatcggcaccgatgtgccaatgtatgacgtgccaagcaagctgctgcacgaaatccagcacggcattcagaatattgaagggtttgcgcgtggcggcactttagaaacgggcgctggtttgagcaaccttcatgctctacttgaaaagcagaagaatgaatttgaaaacgagcacgggttcaacgactggatttttgaactaatactggagcagccaaaacgacataaagccttgatggacgagggcgcaaaagatgggtattcactccgttcgctatatcagtcttttgctagtgagaagctatcagaagaagatcgcggatatttcgtatcgaggatgctgggttatgaagataaactaagaaaagtcgcgctttcaaagcacataactccgagcgagttctatcaacgattagcaggcgaagttgaagcccgcaacacccagatccgccataagatgacggctgaacagcgcaaaagcacaccgccaagcgcaacgcaagatgtatccgatgccgatgccattgtcatgttcaacggaacggaaatgcacaacgcgcccgcaccggcaaacaccggcacaagcgacattcgcttcagccgctcagctaacccagcttcaataagcgcggcaccaaacggaatggcagcttgggatagcccttcggcatcgaagttcgatgactttgtttacaagatgcaagataagcacgttgatacaaagcgcgtgattgaagctatccgcgacacaggtaaggcaatcagcgatgacctagacgtatacctgcaagaaacattgtttcatgggcgagcagctaagcgcacgcaagacttcttaaacaaggaagtaaacccgcttattgagtacatgcaaagcgccaaggttgaaatgagcgatcttgaagagttcttgcacgcacgacacgcacaggaagctaacgcgctgattgctaagcgcgatcctaatatgcctgatggtgggtcaggtatgacaaacgctgaggccgcaaaataccttaattcgctaaatggcgttcgacgtaagcaattagagaacgctgcaaagtttgtcgataagattatcggtggaacacgagaaaccattgttagctatggccttgaaagccaagaaacggttgatggctggacagccggattcaagcattacattccgctgcagcgtgaagataaagacggccagatgggtattggccaaggcttcagcgttaaaggaaaagagactaaaggacgcacaggctcaacacgtaaggttgttgatattctggccaacgtgatgatgcagcgtgagcgcgccattgttcgtggtgagaaaaaccgagtagcagttgcattgctaggactcgctaaagataacccgctacctgagttctggcaggttgataaagttccgacaacacgggtgcttgataaagtaacaggcttggtacgcaaccaagcggaccctatgtacaagagtagagacaacgctattgtagctaaggtaaacggccaagagcatgcgatcctgatgaacgaagacgacccacgcgcaatgcgcatggccgaggctttaaagaatcttgatgcggcacatctggaagggttgttaggtgctacagccactgcgacacgatactttgcagcagtgaatacgcagtacaacccgatatttggcgtaacaaactttgttcgcgatattcaagaagccatgcttcacttacaaagcacgccactagcagggcagcagtcgcgcttgttcaaaaatacattcaccgcagttggcgcggtaatgaaagcagagcgcgacggcagaaaaggaaataatgcaacagggaagtggggcgttttatgggaagactttcagaataccggtgggcagactggcttcagggatcagttcagcaatagcgcagatcgcggcaaagagatccagcgagctttaacaccggatggctgggcggaaacaggcttaggcaagttctttaccgccaatggagcacttaaagcaccgctcgaagtagtgcgcaaaaaagcggcatggctgtttgatctgctatctgattacaacacggcaatggaaaacggcgtgcgattatctgcttatgagactgggattaacgctggcatgagcaaagagcaggcggcagcactggccaagggattgaccgttaactttaatcgaaaaggccaagttacccagcaagtcggcgcgctctatgcgttcttcaatgcgagcgtgcaaggtactgctcgattaggtcagtcgctgtttgatatggatgctggcaagcctaaaacgctacgcctatcgtctctagggaagaaaatcgtatcaggcggcgttatgctgggcgcgtctcaggctgtactgctagcgatggctggctttgatgatgaagagccgcctgagtttatccgtgagcgcaacatcatcataccgacgggcggaaaaacctatatcagcataccaatgccgcttggctatcacgttatcgcaaaccttggccgtataccgatggagtttgttcttggtggtggaaaagatggcgctaagcacctgtttaacctaatggacgtaatggcagacatttacaatccaatcggtaactcaggcttatccatgcaaacaatcgcgcctactgtgctcgatccgcttgctggccttgcagagaataaagacttctcaggtcgtgcgattgcaaaagaaagctttaaccgccagacgccaggtcatgcgctcgcaagagatacggcatcactgccggcaacatggctggctgaattagtcaactatgcaacaggcggaactgagtttacccgtggcgagttatcaccaacacctgatcaaattgattaccttgttggtcagctaaccggtggtgtaggccgagaaaccactaagtttatgaagtcgattcaggcgactgccaccggtgatgatttgccttggcacaacattccgttagtcggcaggttttttggtgacgcagacagcgacggagccaagcagtcagccttttacaacagcatggacaaggtgcgtaagcatgctgaggaagtgaaaggtttgcgcgcctcaggaagatcaggcgaggcagtcgagtacgccaacaagcaccctcatgccaagcttcatctagcagccagagcagcagaaaagcaagtgaaggatatgcgcgatcgtaagcgtgatcttgagcaggcaggcgcgccacgggaagaaatacgcgcactagagaagcggatggttgagcgcatggagcaatttgttgagctggccaaggcgcagtaacattttgatcgcctcgccctcagcaatgaaggcgaggtttaatgttaagttacgcctgaaaatgcacagctgcttactgccctacacagctgtaatgattaatccgaagcttgcgctggtagtcgtctaaggcttgcgcgtaggttttgactagctggtttgcatggcggttaccatccagaatatggtcaatcatttcaatgccagcacgtgagcctagggctttcagtgattcatacatattgtacttgttaaaaatatcgtacagatgattcatgtgattgctcagcaggtaaaccttatacaggtcgtcttcggtcatgacgccgttaggttcctctttgccaagaaactcaccctcaagagttatgcgagccactaagctgactgcatcactaaattggtctgactcaatctctttgtatgagcaaccaaacttggatttgagtgctgaccagcaagtgatggctgctttggcctgtttgcttggtggcagagtttcaacacgggactttactaaatctttgatgatggattgctgctcgatggtgagtggagttcggagtgttttttgagcacgatggttaacagcttcgccttgctgccagtagttggccaagacctgatagcactcacgcttgtactgaatcagcgcaggccggatctcttcgcgacaacggctcacatcaatgccgaacagccagccgtttaggtattcgagtgggagacagagaagttcacgctgtttattatcttcggcaactgtattcatcatgaatacggttgagcctaaaacctcgtcacgcatgattcggttacgctgtgagccccacgccaaaccgatgccttcgcaaactggacgcatagcaacgagctgctgattattatgggttatgacagtaagagtgtggttgtgaaactggactgaagcaacttgagttttcatagtgagcacctttcagatttgagaggttcaccaccgaagcgaccaagcaagggtggcgaactgtacgcaggttggtcgaccgggcgaaaggaccccggcacacccgaaggtgtcccacgcacagcccgccataacgcgggcacaaaaaaaccgctgatgcggcgttgtgcgcctttcaagttccgggcgaccaaacccgtatcgctgaatttgcagcgacgcgggaaaggtagcctgaaaatagcaaagcgtcaaatagaaagtgattttatgtattaagtggcttacttgactagaagtgatggcgtgctaacttaactaattcttatgttcaaaggatggaatcatcgtggtaaacactaaagcgcttgtatgcgcagcaattatgtctacagggttattattaccagccactggtagtgcctatacaggtaatgatttagatatgtggttatcttcacatgctagggtagttagtggtacaggaaatgctaaggacttagaaaacttagattttcttacggggtatgtggctggcacgtatgacgcacttgatgtgacagggaatctgtgcgcgccaaataatgtgactttatctcagatgatagcggcggtgagtaaagagcataagaacagccctgaaaagtggactgaaaatgctcgcggtattgtgattgtcggcttggtcagatctttcccctgtggtaaatgatgcttactgaagcggtttactcactggcatggctctgtgagaaatgctctgaaaaccttagagttcagacttgagttgagctctaaggctaaagcgaacagcatttgtttgcttattgaattgaagaaacgcactggcctttgatgtaaacgaatagtgatcgaccgtcatttaagctgtacacccattgctctgtgccgactatcagcgagttaactgatgatggggagccaatagcgcttcgcacctcgctactggtcataccttgccatatttctttttggcctattctcactattcctcgtttgggctttcgagcagtgcaagcttcgcggctaccatcttgtgggcgcgggtcattcatcttgttctcgatttgcttgagtcgtctgtcgagagggctctggttaggattgtaatgcacttcgcgatcatttatttcaggaagagcataatcaggctgggaagaagttgtcgcccttggtgatgaagttaggccaacttctctggcttcacggcgcaggcgaacagcgcgagctgcttggctttcgcggcttgaatcgtgaactaccgtcacaccgctagggttttccttacgtttcctggctatagcttcttccttttcccgcaagcggcggttgattaggccgccaagggtagaagggtcttctgcacgaggatctggcacgacagtgaccttcattgttgagctagaaggattgctgcgagcatattcaatttctctgacctgctctggagtcgcgaatgttcctatctgattggtttgagtgttaactatctcggacacaccttcaggtgttgtacaaggcacgtttgcgaagctcacttttccgtcagggcttatgcacttatagacttgactataggcgagtactggggtcataaaaacagcaagcatgacgtaattccacatagcatttctcctgaaaattccttgtgttgttttataagctgcaagcaaaaaacctaatatatcaaagcatccggcagattaccttagtgccaccctgtagagtttcacacgccatgtaacttcctaaagaatacccaaaaacggtatttggaagttacgttatgtctgacgatgttaagaacgctataggccagtttgcagcgtggtttgctggtgctatcggagtcatcagccttgaaatgtggctggcaatcgcaggtcttgtcatctcaggctttatggcttggaccaattacaggtcgcgagagattcaagatcgcttattgctcgaagaagcgatgcgcagcgtagagttgcatgaccttgaaatgcggcgtatcagggcagcgatagatattccgccagcggtaaatcgaccagttgtaaaagagcttgtaaaagaatctgcaacagcgaagtgccgtgatgagtaagcgcgccagagcatcggttatggcgctggtgattagcgccgcaggtttttctgcttggatgacctcggaaggcttcagtcctacgccatacattcccaccaaaaacgatgtgccaacaatcggtcacggttcaactcggtacgaagatggctcaccagtaaagctcacagataaaccgatcaccaagcagcgggcagagcagctagctcgaaaccttatgagcactgatgaagcacgctttcgcgcaacaatacccaacgtcacgctttaccaagaagagtacgacttatacctagactttgttggccagtacggtattggcaactggcgctcatcatccatgcgccggcatctactgacaggcgaatacgcgaatgcttgcggggcattgctgcggtatcgctttgctggtggctacgactgctcaactatgatcaacggcaagcctaacaacagatgctggggtgtctgggtaaggcagctagagcgccatgacaaatgtatgaaggcgcaagcgtacggtgatgacgaatgatacagaaagcattgaagttgttttttaacggactcagcgcagaggctcgcatcatccagcttaacgctgcagtgaaacagaggacgggattaagtgaatacagaactacggcaaacactattcatgctgatagcactagcggtaacaggactggcagtgtttggtatgggatacgcgctcggcagcaaggcaccagcgttaaaactcgaagagttaagaggccaagtaagtcggcagtcagcgcaggcaaaagaaactcttgatcagctgaccaaagagcgagacgaaaagcaggcgctgcttgatgcccaggcaaaacaacaggaggaaaacgacaatgctgcgaaacttgaaattgctcgccttgctgacgagcttgcaagtcggcctattcgggtgcgcgtcatcgccgcaagtggggcatgtagtggtagcgccgctggtgacaccagcaccggtaccgaaactggtacaggaaacgatgccgcgaccagtgggctattaccagaacctaattctcgacgccttagagcagcaatagcagaggttgaaacgctgagtgctgcgtacagttcgtgcagaaaacgattgtttagccattgacatcctccccgacctaaaggacggggattcctactgctagacggccatgcccgaccgcgagaatgttacgtgccgcgtttacatcgcgatcgtgagtgacaccgcactcacacgtccattctcttattccaagccctgcgatacctttcggcctgctatcgggcagtgcgccacaacagctacaggtttgggtggtgtatgcctcgttcacttccttaaaaacaatgcctgcgtgagcgcatttatagtccaacattgtttttaattggccccagccagcatctaacactgacttggccatcttggttttaacgagttttaaactactgacattgcccacatagatctcaccgcagcggttgaccagcgtgcgactgaacttgtgcagcgtatcttttctacggttagcaatcttggcgtgaatggttttgacttgagttttatttctagcccgttgcgctatggctaatttctcttcaaggccacggtagaaacgaccggcttccagctttgtgccatctgagcaggtggccgtatccgttaagcctagatcaataccgatgcggtcttgtccgactgggatctctgactgcacatccaccaccacattaaagtaccagcggccacgcgcatcctcattgaaactggcagtacgaaaacggtgttggccaaggccgtagctgtcccacactccaaagtattggccgttgaaatagacttgcccgcttttccactgtgctgcaccggtgtttaccggaatccagcctaatgagcggcgtacgccgcctgacttgcgccagttcagcctggtcttgttaaactgtttgcggcgagtcacgtactcaccagcaatgcactgcaaggtttggctgtgcaagcccagttccttgcctgcacctttcgtatagggatgcatatcgtaagctgatagaaacacactgcgctctttgatcgagcgctggcttaattcattcacaaagttccagacgaagttcacggccatggcttgcttgcgcagcaatgaaatgtgcttatccttgatacgaactttgagtgttttggtgtgcttaatcatgctgtatacaataccagtacttacccttagcgccaatactttagcagtctattaaggggcggcttgcgccgccctcgctatccatcctcgcactaaaagtacgaggtctttcgcgaaactgataaaaattaacatacgaacaattctagaagcccttatctggggcgactttatgactctaattactcagcgatgctacaaaagtgctaaagcactggctaggtattgcgtaagtcattgatttatattggattattttaactgtggtgccgatccatcataggggccaccgcaaacaccgaagcccagacctgcgggacttaggcagtaactgcgagggattcggtgcattttca

SEQ ID NO: 6 - DNA, 85869 bp, bacteriophage
aaatgcctgtgcaatcaggatgggtaggttcctccgctgttactgaaacaggacaacgttggatgagtgcagctagaaccacacttagactaaatgctgctggctggatgagtgaaatggttggtaaatctaaagaatatgttatcaacgttggtgccagtgataactatgacagggatgctcttgttaatgctatgagaacagcctgtggagggaattggtcaggggctgctttcagaatcaacgtttcaggaagaatcacatgccctgctaatagaaactctgtattctggtttggtggagatatgacagcagtgtcttacgttcacattgtgaataatggatggattgctggtagaggtggttacggtaaacgttctgacgaaagggctggtgacggtaaacacgctattgagaactatatcggtactaaattgaggattgaaaataacggtatcatcgcaggtggtggtggtggtggtggtggtgcaacaaacgcttccggtggtggtggtggtagaccattgggtgcaggtactactaatgctcagtttaggaatggtgctgctggtacttgggatgcaggtggtgcaggtggtagatatggtacttcactagctggtaatggtggtaactttggtgagaatggtggtaaagcttctgtagggagtggtggtgtagctggtgctgctggtaacgctggttatgcaatttatggacaagctccaacttacatcaaagctggtgatattcgtggtagaaaaccttaatagattttaaataggagtttagtatgacgattggttcagggtgggtgggttcgtctgctgtagcagaaactggtcagaggtggatgagtgctgcccgtacaacggttcgtttaagtgccgcaggttggatgagtgagttagttggtaagtctaaagcagatgctattatgactgtaggtaagtatacaaatggcccaattgtaacatatgggtatattagtagtggtcaaactgctacaggttctatgactggtacaattggtggttacactgtactttcattatccacagctacactcggaggtcaataccctgctgcaactttagttctctcaacaatgcctaataagaattgggtcttaaacattgatgggacaaacttcacatttaaaccgacctttatcagtgggaagcttgcacagtatgactgtacagacccttccggtctaattaacttcctagctccaagggtaggtaaacaagcaccaattcttgtggttagttaaaaatggggtctttacagacccttttcttttgttctttcaaagaggactaacaaatgccttttctgattactctgttaaagacaatcttaatcaactttggagtaaacctagtagtggcattgtttagtgataacactctagagtttatgttctttaaacttgctagatatctagcttcaaaaactgagacccctattgatgatgaatttgttgataccctctacaacagtttctatcaaaataaggggagtgtaaatcctaaagaggtaggtaaatgagatggttccaagatgttctaaaagataacgtcgcagttttaattgcaacatttgtttcacttgttgtttcatgggctaacctgaacaatcaaattggggatttgaataaacaagttgaacagatgcaagcgtacagcaataaagactatggaaacattaaggatgtgcaaaaggatgtgaacctattgaaacaggattttgctcaacagcaagcttatattgattctctgagaagagactctgagaagaccaactctaacttggataagctgactgactccatcaaccgacttacagcagtagttagtgctctggaagttaaagcagaaatcaaaaaatgatttcagtttgagaagaccccttgattggggtctctcttaaaagatggattacttagatactatcagtggggctttaatcacacctgcattgttatagattgggaagaatttaccaaaatctacagcagtcagtctttcaagttcttccaaggtttcgaaagaatctggaagaataagtttaggtgcatcataatgttcgttattgattaaacgctccatctgttcagtgtggtctttgtagatttgcacattaccaaacatagctgttaagtatcgtggtttataccctgtcaaacgtcctagaatgtgcattaggagtccgtatgaagctaggttatatggttcccctaagaacaaatctacagaccgttgatagaattttaaatcaagccactgaccatcatctatgtcaacttggaacatcatatgacaaggcggtaatgccatcaaaccttgtgcaatatctgctggattccatgcttgaacaatgtgataacggctataagggtcacgtttaataccttctacaaggttcttaatctggtctaccggaacacctgaataaccgactgagttacgccactgtacgccgtagatacgtccaccacaatcagcattctcaatcatcccacgttcttcactccaacgtttaaaatcatcatcccaaatagttctttgaccttcatctacaccaaaagtcttcatgcgtagactactcaaatcattgtgacctcctaagaaccacaacaactccccacaaacacccttcatataaacctgtttagaagtcagaatagaaaagccattacgcatatcataaaagatgtgtggagtgttaaaagaacatttaacttcccctgtacgggtatctctcacagaaccatgcttctgaataaaattagcaatgcttttgtaacgaacatctaatatactcattttacaatccccttacttagaagtctttgtgtaggctgttactttgccagaaccatctggaagataacggaagaaagcctgatgaagacttgctgtaatatgccccaattcgttatcattgatagttacttgggtaatatcttcaccattattatggtaatctccaaaaatctctgtatggtaaacttcatcaaacatatgagacaactggataagtagtgatttcccccctatcacacagatagtgttggtagaacctctccggtcattactagtccaaatgtttgaggggtcttctaaccaacgtactgtattctctaaatcaaatggttttacaaagattacatattcaccatcaatctcacacatctccatttcaccagtcaagaggccccttccagttgtgaccactacattaacacggtctggaagaggctttccaccaagagaatcccaagtgttgtaacccattactacaatggttcctgtggtcatattcttgaagaatgccatatcctctttgtttttaggccaaggtagatgattgtcaatcccaaaagtgcctacagagtcagttgcaaagatagctttaatagtcattttcttattttccctatttcattattcaataacttgcccgtcaatagctgcaatgattttaactttaacatgcaagtaggtgtctatcaagaagtcagtcaaagcatctggtacaacttctgtagagaaagcttgtacagttccatcggtactttgcaaaacatacttaccttctgactcactccactcaaagaacatttcttccttaccttcaaccatcttttcaaagattgtcttctggaacatttctaaataatccttagcaacctttgccttttcaggatgtgccaagtgctctacagttatttctctccaaacctcaagtgtgactgtaccatttggacgtacaaacacgttaggtgtctttaatacaacctcatcattgatggtcacattgaagaagtcttcttggtcaacaaaacagaccacactaaaactatctccacctttgaactctacaccttgttgctggtaaatattcttcaacaacatctgagtaatgattggttgacgtagccatgctttaacatcacgatttaatcttgttggtttcattttcttattcccctgcttcacacatttttaagaatgctttacgttcaagtaaagcttcaatgcttttaccgtttcttttacgccattcaatttgaaggtcaataagtgctaaagtcccctttaaagtggttttgaaataccaacctgaatcatcttgagcaacttgcactatccagtaacgttcaagacacttctgaacacgttctgataaatctgaatgagaaggttcagtgatagatacgtgcaaacctttctcaccatctgcaaagtacagaaccttttccattgtgtatttaagcatctttaaagacctctatagtacgtttatcagtgtcaacctttaaaatctcaaagcaatcatcgcttttcttccagttaacgttcttaatgcttttagccatttctcggatagtatcgtcatttttcaacatccaattacgaaccatttctaaatcagctacttgtttaaagtcaccttcatccttggctttgttaatgtaactttccaatttatctcttgaaacatctacacgaattgaatcagagtttgggagaccatgttctttaaagatacgttgcagactatcgaactcaccagtttgttgagcgacttgagcaatagcccacatacggactggataaagatatcgtgaagcacctttacgtgcattgccaacattactatagaagtctgagatagttcttccactcaacttctctactacacaaaatcgaatcatttcctttcccctgtctgtttggtatgtctaaatagtagttcttcaaaggggtcttttcaaacccctttacaaaaccttacttagaacaggatatttaagtcttcacgactgaatgcgaaggttttagcagaaccaaacccttcaatttctgcatcaagcattacagtgtctacaccatcaatctcttcatggatggtactaatcaaacgtgccttgacaatgctgctagaacccgtcataagcttcttattagagatagctgaacccaactgctggtaacccttcttacgtgtccctgtaaagctaggaatgtcgtctaccttagcaatcagcttgtccagaagactttcaccaatcaacttctctgtctctgtaggcttaccgtagaagcacagcacataagttactttgtcatgggtttttgaaactacgttatctaattgcattttaatgtctccttatttgttactcataatcacgaattgctacaccacgtgggaattccaaagaaccatcgggagtccaatcttggaacttcactgttaacaatttacctttatacttactttcaaagtttactacgaagtcttttttaacgtcttgcgggacattacagtcaacaggcaaagttgtaccatttggaagcataaccacaagctgtcccaaaccacgtttatcaagctgtagaccaacaatgacaaattcagcatctttgaaaatcttccacttctgtaaatcaaaagaacgttccccaaaagcataaatccctttgtggttacgtagcataataccttcataaccatctttcaagaattgcatatgtgcttttcgagcatcttcttcattcttcaaagaagaaaccattgggacaacttggatacgctcatatccagaagctgttactgtgtcaagtaattgcccatagagcaaactactgcgctgagaccaatccaatgttctgtccagaggcagaaagtcgaatacggatagaataagctcattacgttgttcctttttagcattcttaaccaagctgttaatatctttaagatgcatcccatgtatgtacatttcaccatcaatggagtgaacatctttcttcatcttcttacagaggtcattaatctctttattcattaaatcaggaatcttatagattttaccttttcgagaatatgagattactgaaccttcctgtccatacatcttagtacgaacaccatcaagcttacgttgagcatcacatttcccatactcaaccttctcagagttcttaccatctgtatagtcttttgcaagcattacatcccaagactcgtaacccattgctttatcacgactatcttgataacgctctttatccatcttagctttcaagcgtgaattgagttcaaatacaccttgagagaatgggtctctttcattcttcttacccacgttagtaggttcagcttgataagattcttcaacgtgattatcagaaccatctacccctgagaacatgtgaaccattccactattctcaacgtagccataccatacacgcaatttacctttcttgtctcgtttgaatacaggttcaactttatacattatattcaccagttcatttcaaaatctacttttgcgttttcttcaatcggattataaccaaggataaccccatctggaaattttctttggtatgcctgaatatcagaaatatcatctatagagatattatcagattttaccatagcccaaccacgttttccaaaatggaaccaactattcaacaggtactttgcaatgtcttctttataaccgataaagatacagataggctcaccatcatcatgcactgtgataagtttggcttccatctggtcatagtctttccagattcttttcatgattatttacctgcatcttccatagcatctgctaatgcaaagtgataccaagcacgtccaccagaatcacaatcacgactcttatcaataccgtatttagtaccttctgcaaagtcatgtaagtagtgacgcccctcaccacgtgtcaaaacatctacatcgttttgggtaaggttacgacgaactaactgacaacctccataaaaagcctgagaacggtataacacttctttcccatactctgaggtctctttagttacgttagcctcgctgtcaggcatccagatagcattagctgctttctctgcactattgaaaccttctgacttgctgtcaaagactgaaccaacatctaccccaacatctttcaaggtttcattgatagtggacgctgaattaagagcacccataacggctgtcatagtcgcatttgccatagcagaaccagtcaaagccattgtcaaaccaattgccaaagctaattttttcatttccttttcctcccgtttcaagatgaaattatcttaaatttagacattttaacttgcaagtacctttacagtcctttacaaatcctctaaacctttcataatgactacaagagctattacatccatgattattgcaagtattgtcatgttcaattcctctttttaatctttgtttcatagacgagtgtggcaactatcagtaaaaacagtaatagaagccctagaaaggtttcgctaaagaatattgcacaaatcattgtttacgttttcctagtttaccctctgcgacaagtttcttcccatgctcaatcttagcatcgtgtttagcgaaaatttctttaagttctttggagaatttcttatcagatgttctatcaaggtttcctgataagtattcatcaagagcatcttcaacagtaactttcttttgagcataagcttcaaaaactattgcaccagtttcagggtctacaagagtacccttccaacaatcattttgaattctagaaagcgtcttaatcatacacacctccaagtgaagggagtgctatacacacccccattgagtgttatcattctgtatcttccacttctggattactggcttgatgttgtacagctttagtaatcaagtaagcaacagcgaaagcacctatagcaacaagcagttctaaaagtatctcaatcatagtaattacctcaattgtatatatcttacactattaagatacctaaaatgtatgagattgtaaagagttcatgacatttggttataaacactttgtgctattactataaaagaaaaaggctgacctaagccagcctctttacaattatttaattagtgtactgctaaccaactttcaccagcttttgcttcaccagttactaatgttttcgttttaagtcccaagttcttagatgcttcaccgtagtgccatgacattgcatctttaactgcaccgataatatcgtttggagattccattgaagcttcatcgtgaatacatgctaacaaacgagcaccagtacaaggtttgcgtccgttcagaaccatgtgaccttcttccaaaagacgacgacacaataagttaacagcttcattctgtacctgtgcttctgaacccatcaaaagatagtttaacagtttgtgtggggacttgacccaaacataagcaccagcaacatgaacaaatccaccttttgagattggatgagatttaccaaactcttcttccaaagctttcttgtacatcttgaaatcttcctcaagacggtcaatcaaacgtttaatttttggaagtttggtgaagtaggtctgtttaaccattgcaccttcttctttactcttcatcttgattgtaagagcaaacttatcatcacctgcaccaaacaacaatgcatagataccattcttagctttcttacgtccacctgaaatcttgtgatgcaactcactatcttgagtaacacgacattccaagatatcctcttcttcattcaaaccaaagtagatactattcatggtatgagcgtcagtaccagtatagacaatgtacacatcatttgcttcatcatagtcaagatacttatcaactttcgggtcaaggtacttatcaaggtctttacaataataacttccatcctcttgacgtgagaattgaacttcttctttaccctctttaaccgctttcgtaaactcatcatcgcccatgaagttagctaacaagaccaactgagcagagttcatatccgttgaaactacagaacaaccctgttcagcaatccaaacttcacgcattggttcaccaaaaactgctgcaccagatggtacgttaacaatcccacgttgagtcatacgtccagttgaagtaccaaacactgtggcacctgctgacatacgcccatcttccctgaccatgttcaaccaacctttttcatcatctttcgcgttttccattgtacgacgacgatgcattaaggtgttgtaacgagcaatcttctgtccaatttcaccttcaatcgaatcatatgaggattctgtcagttttggtgaagttctcaataatgacccttcaacttctggaagagtacgtttcaaaccccaatcataaacgtaatatgttttacctttatgttcaaacttttgtaatccaagttcttctaaacgtttacgattatccttgttgggatgcaagaaacgttttgtatccttgaatcgacaaaccttcataggcttaccatcagcatctttcttatagttgtactcagttggcttccaacctactgtgaacaaatacttatgaacttgtgctgtctgactcatcttagcatcttcaaagataattggagtgtaaggagcagctatcactgtgtcttctgtaaccatgttggaatctagctcaaagtgattcaccacattgttcttcaacaacaacatcataactgttttcttaacaggtttccaataaactaccttttgagacttcttggtaacaccttcattaagcttctcattcaactcattacacaaagcccttgcttctgctaacttgtcagtaatcttcttatgaacctcaccagtaatttgatgaacaagttgataagtcaccttctcagtttgtgtaaaagggtttgcaacatgtttagctagtggtttaacaggataaagtttagtctcaccattacgttgacgctctacatacttggtcttaggccactttgtaatacgcttgtaagactcatccatagaaagctcaacatactcattccactcttttgcaaagtcttctatagtttgtgtaccacgattcttaataacttttggtagatgtggctctacctcttctgcaatcttggtagtttcaatatcaagctgtttcacatactcacgacacttgtcttggtcaagtttccaaccattaatttcttgaacagtcaaccagaattgtgcttgcttagtacgtttataagtttcccaagtgtctacaccacaacgtttcagtttgttgtattcaatattcaactgacgttttgctcgacggttgattttgatatcttctacaacacggttaagaatcttggcgttccatacaccccactcttcaatttctggtttacggataccacaacgagcaccccaagcagccaaaccatgagtaccacgataaccacgtggagtaggacggtcataccactgaacacgactctgtacaagtgaatcaccccacttatcatcccaaggtttaacagtgttgatgttgaacaaatcaggggcaatctcattaaatacccaatagtcataaccgaagaagttgtgaatccaaacctcatcacaattatgtaacataaattcaacaccctcacgaagtccacctttaatgaactttgtttcaggcacaccaaggataggttcatctgtaaaaacccaaatgtgattctctacttcttcttctggaacggtgtaatcacagaaagccattacgtgacactttgaaaattgaagtaacagaccgtctgtttcggagtcaccaactactctatatttcttcttaatttctgccatttctcttcctccttttgaaacgatgtgttgatagtacccctttgaagaagtttttgcaagacccttgacagaacttgacaaggggtttattgttgctacatggggttttctaaacagggttcttaaaagactctttaaagagaactgtacagttgttctttgtaggtgtctataagaatcttttaaaaaggttttgttaaaggttctaaatagattttcttaacctatttaatatctaacaaacataaccaataaaagaatatcttctaaaaagaagagacaaacatcttgtgaaaaatttctaaaaagacgcttgacactgtgattcagaatctttatagttctccctgtcaaaacaactgacaagattagaaaccaagtaagaggaaacataaaatgaaaacttctatccaatttaattcaaaagctaactccaccgaagttgcagaacatgctctgataatggctgctatgcagacctatgttgttcacaactctctgcacccactctcaccatttaaagatgttctggacgttattgctgaacgtatcgtaccagaagttagtgcagacactactcatgtggtacgtactgtaagcgatgctatgagcaaggataactggtcaaatatggctctaggtatgctgcttatctctgaaaaaatgctacgtgctggtctgaatctatatactgcaagctttgcaaaacctttgaccaaagcacaaactgccaagattgtagatacatttgaaaatgattctgacatggctttctacttgactgctatgaatctaactgcactgaaagcaatctggaacatggcaatggaaacaagcattgacgttacacgccattacgacaaagagcacttcctagatattgcagaggtattggtggatgatatctttgatgttatggacagaggtggtatcactttagaaggtatcttccaaccagtcctgcaatcaatgcctgacctgtttggctttgtaatgcctatgttggatgaaaaatataaaaacatcccattaggacactttgtaaaccgactgtctcgggatgttggattgaagtttgataagactatgattcacgctttccatgcatccggtaagttcttcttggaagaatacttagaaggtgacgtgtcagaaatcttcacagaagtgtttgatggtgtttgcgaattagctaagtctaagtaaagctttgtaaagatactatgcaaactctcaaaaggggtcttagaatagaccccgttaagaagtgaggtaaacgaaatgcagaaaattgttataggattgaatggtatagctcggtctggtaaagacactgctgctaagttcatgaaagagttctttgaagagaagggtatgaaaacagcttcattctactttgcagaacgtcttaaagatacggttgattcagtctttggttttgatgaacgtcacagggatggtgtcttgaaagaggacattgtttgctgtgaggcaaaactggaatgggtaatcaagtgcatgaaagatgttcttctccatgatgtttgtgagacagaaacagaagcaaatcgacttgcagacttcattacattgaatcttcttgcaactcttatgaaagaatctatcgcgtatagtgtggagggtgatatttttagttttatgatatccccacgtcgaatctatcaagtatttggtactgatgttgtccgtgctaatgtcgaagactcgttctggacagatatcgtaaagaatcagattattaagagtgatgctgatgtggtttttgtcaccgatgtacgctttgataacgagtgtgaaatgcttgaggaagtcgatgggagtggaatacattcttggattttcaaggtggaaagacctaatctgaaaacaaaagttacttctcatgtttctgagaaaggtatctctgactgctatgtttattcatatctggttaatgataaaggtttggaagagtttaaggagttaatctttaaacgtcttgaccttttagtaatgccttactgtgagtaataaataggattcttgacaaggaagtcttaggggattagtgtatagcaactggtagtttattggagaagaaagataatggctaagaaattgaaagaagctggcacttatattggtcacactggatgccctgaatgcggttcgtctgatgctggttctgtgtataagcatgatgatggttcatactctatgacatgtttctcatgcaagaaaggttttccagaatggaactatgaagaggataagatggtgacacattacactggtgaaggggataaaaagaaccgtaccttcttaggtcgtgatatggatgctgttaagactgaactctgcgcaatgagtcttaaagaccgtaaaattccagaatcaaccttaaaagattttggggcattatgcgatattgatgatgatggagaggtctgtgctcattactatccagtttggaagcatgagattgaagatgatgaaacttcaccaatcatccacacaggctatcgtatccgtcataagtttccagatgattacaagaaaccagaactacgtgggaagatgaaagacttttcaggtggtgtaggtgatatctctggcaaactttgcatgtatggtcagtggttgatgccagaaggtggtggtaagcgtcttatcatcgttggtggtgaggtcgatgcaaaaactggtcattacatgattaagatgagcattgaaaaggcacgtcaaaagaattacttggtagtgtctgtaccatctggtgagaatattcgtggtatcaaagataactggaagtggattacatcatttgaagaaatcattctagctttcgataatgatgatgttggtcagaagctgacaaaagaaactttgaagattctacctattgagaaggttcgtatcttccactatccagaaggtgtaaaagaccttaatcagtggtggactgaaaactataaagaccgtaaaaacgtcttagtagattttaaatcacgtatctataatgcagaaagttattgccctgctggtgtaaagaactttgcagatggctttgaagcaatgaagaatcgtggtttggtgcagttgattccattcccatcttcaatgggtgacttaaacgtagctacttatggtggcatgggtttaggggaaatcacaactgtaattgcaccatccagtgtaggtaaatctgctttcacacgtgaaatggcatatacagcatggaatgagacagagtaccacattggtattatccctgtggaagatacgtatgaagaattgatggaaatgttctgtgcaatccatctaaacaaacagattaacgagattccttatgatgaacgtgattgggatgagattaagaaagctcacgcagaactgtcagaaggtcgtcgtattcatattgttgaccatcaaggggcaattaacaaagacaacttgttagaattcattgactatctggtaaacgtagttggttgcaagctgattatctgtgaccctatcacactggcattgtctggtgcagataccgatgaagaagaagttttgtcagaaatcctacgtcgagttaagcgttacaaatacgctcatgtaaacgtctgtcacgttcgtaagaaccaaggtggtcagaaagctaactcagaaggtggtgacattgcagaagaggatattaagggtactggtgcttacttccagatatctatgaacaacattatccttacacgtaacaaggttgaccctgaccctgttaagaagaacctgacacgcattaaactgtctaagtgtcgtcgtcatggtaaatctactggtgttgtgggatatacttggtataatggtgatacagggcgtttggaacgtgcaggtggtcgtggtgatgatatcgacaaggctgctgaaaacattcgtctgacacacaacatggaaataccagtagatgagttctatgaagacgaaggtgaagctatgggactcgttattgatggaaatactggtgaagttctttcataaaaatttttaaaaatttctctaaaaaggtgttgacttcacaatatgacttctgtaaagtacaacaccgttgagagacaacaacgaactaaacaaaatcttaaataggagacataaaaatggctaagactactctgattgcaatgaaaccagtaactgttaaacaagctggtcaagagcgcgaatcaaaacgattccttctgaaaggtgtttggttctactactgtgcaacttctccacgtttaggcgaaggtaagaaattcaacaaacacttccctgcaaaagatagccattacggagttaacgttttactgtcagaccgtagcgttctgaaaactctgaaagataagaaattgggatttggtaaagtaactactgaaactgttgatgctgctgactttgaagataaattcaaatgccagcctccatttgaagctgatgagtatcatttcttgaaactgtctcgtcacgctgcatacggggatggggcaacttgggatgcaattcacactttcccaatttatcagattgaagaagttaacggtaaacgaactgcggttaaggttccatttaagacaatcaaggcagtaccttgtaaagaccacgatgaaaaacgtacttacgatgtaaaatgccctgatattatgattggtaacggttcattcggtaacattattattcaaggttacttctacgtcttcaaagacgctttgaatactaagccaattcaggaacaaatctttatcgaagacttggttgaatacaaatcttctggtaagaaacctgcaactctggaagatgatgaactggcagccttgggtctggaaggtgttgaagatactcctgacagtgcggttgaagaagcctctgataaaggtaatgacgaacctccattcgacactgatgatgaagaagactttgatgatgagtctgaatcagaagaagaagaagaagacgaagaagatgatgaatgggaaaccaactaatcaacttctgaataaataatctgaaaaggcactctacggggtgcctttctttttaggagaatatgaaaatgagatatgtagtccctaaagtaccttcctctgtaaaactcctctatattgactctgacccaattgcttatcacggtgcttgcggtgttgagaaaaccacttacaactttgtgaataaactatctggtgatgagactcaaatgttccccgatgcaagaaccgctaaacactggttgaaagaccaatgtgaggttgctgaaatgctcggtacaagctttgaccccgatgagtgggagcgtatgtcacataaggaagtacgttcagaaggtgaggctattaaggccactaaatctactcttaattcttggttgaaatatgccaaaggtattccatttaaaggttacttaacagagcgtggtgtcacaaagacaaaagacgtagaaggtttagaagaccgttatcaaggtaaacgtggaaccattgtaccagtccacttagaagcttgccgtgattatctgttaagttgtcctgagttccatcttctgaaaggtggttttgaggctgatgctgcttgtatatccggtgcagagaagcgtgggaagaaaggtatgctgttatccattgataaggatttacgtcaagcagaagggacttactgcatggatatgacctatctcaagaccaagactaaagcccctatgattttctattcaggggacgatggtgtaggtgagatttggcattgccctatcaaatctaaaccaaagttgaagaagttgactggtgtaggtttcaaattcttatgctaccaagcaatggctggtgatacttccgatggttactatggtttgaagggtgttggtcaagaaactgttctaaatctcttagcagattgcagaacacataaagaatgtttagatgccatgtacagattctatgaagcacgtggtgatgtgacctatcaatcgtgggatggtcaaacagtcactaagactccattagaactgatgcatcaacatttatggttggcttatcaggagcgttctccaagtgatgagtttagttttgataaatatgattggacgatttaacaatgagagttaaaggttttggtaactgtcctgtatatggacattgggtatcactatgtggtgaaatagttccagacaagctacaaggttttgtctaccttgttcactgtaaagaaactcataagtggtacattggtaagaagaacttcttttcagagttgaagaagaaggttgcaggttccacacgtcgaaagaagattaagaaaccttctggatgggaatcctatgaaacctcttctgattacatccacgatgatattcaaatgttcggtaaagataagtttgagttctacattgtccagacctatgcaacaaaaggtggtcttacatatgcagaagcaaacctacaacataaactagatgtgatggtaaaaagacttgactctgcaaaccgacttttctacaatgcacaagtcgagaagataaggttcatcccaaaagaattttatccagaagcagaacaaacaatacttaaaatcttgaaaaacaaaggaacaaaactatgaaatctttattcaaaatgattaaatcattgttcacccctagccgtaaaattacaaatcttcaacgtctggaagaggaactagcaataactcatgcagagttctctgtccgtaaagaagaacttcatcaagagattgaagacttaggtcgagtaattacagacctaatgaataaacgtctaagtctgatggaggaagaagtaggtatggaagacaccttgaaagctattgaaaacattcttcatcctgaaacctcagaaggtaatggggaagttttggtagaagattcaaaagaaatttaatagattctaagaaggggtctgtaaagaccccatttataagaggaaacatacaatgtcagagcaatttgattcatataaagctgttgaattctttaataaggcttgcggtaataatcctccaaagaaaggttctcctgaatggtacacggttttgaagaatcaggtttcataccttttggaagaagttaaagaaattgatgaagctattgacaacgaagacccactagaaatcctagatggaatggctgacgttcaatttgttttggacgggttgatttacctagcccaacttaaacaccgtgaagcggttaagaaagtctgtgcaaataatgatttgaaattcaccacatcacttgttgaagctatggaatggtgcgaagacattgccaagaacaaaggtgaagaagtctatatcaatcgtacagaattagacggtgtaacttattactgtgttaaacgctgtagtgataaaaagattcttaaacctaccaacttccctaaagtggatttgaaaccgttggtagtagagttcaatcaagaactcatggtagtaacttcaccaaaatgtagaatgtgtgaatccttagaaaaaacacttgacaagatacttggaattcacgattatacgcgcataactccaatggagagtgacgcagataaagagttctgtctagataatgggtttggtatgggagacattatcttagtagacaacggtgagtttaaatttataaacttccgtgctattgacagaaaggcttctcaacttgaacaatggttaaaactggtgaactatcatggaatctaaaatcaattacacagtcattgtgaaagacccttctacagaagatgcttcacaggactttttaacgaaacaagactacaacatttctgcttcaattatctttagagacccgcttttcaatcgaactgatttggagtatgaaaacattcttctagcagtcctgtacaagtttgggttcgatattgaaaaagatatttctgtcaccccatgtactcatcgaaaccactttggtgagattgtatcttgtgatatgtttatgggacgcgaacgtaaagatgcacgttggaagaaactgaaatactaccgtcttcacaacaaccgtttaccacatctttatcgttaatctttaagggggtctgaaaagaccccttcaaaaaggagaaggttatgaacgaagatatctacgaagaactctcaaacgcagaaggttcaaaaacttcttatgaggggactctgagaactgatggttctcttccagattacatgatgtacctaccaagaatgacaacttatcgtgttgttggttttacgaagattaagacagataatgatgagtgggttgatggtatagcttactttgaaacaatgggtagtcgtttctttacagaccgcaaggatgaacctgctgtactttatacgagacctttacatttgtttactgatgggaattggagttttgtgtacaattcatctgtaggtgcaagaccaagctatgattcacatgattaagggtttgagtatgaagacaataggtgttggtgatgtagtgtattttgaaacatacacagatggtagtgaacactaccagttattggctaagggtactggaatagtctatcaagtggaagagttgttgacaggtggttacttatactctatcagctacatagacagtcaagggaaaacaaactctacagcagtttgtcaaggaaattctaatttttgtgcagataccatctgcttactagaagaaatgttaggggattaagaaaatggcatatttaaactcatctgctttaaagaaagttattgagaattcaaaaggtgtacttggaaaggataagttcggaaaagatatcttccaaggtgacgctgtagtctactgctctacagttcgtaatggtggtggacgaagtgagattaaagttggtaaagttcttggcaagcaacgtggtaacattcaagttgtagacaatatagagtatgaaaggttgatgcatgaataccatgagtatatctttacagaaggtatcacagcaccaaacgttatagtaacctcagaagaaaaagcaatagcttttgaaaatggtaatttgttttaagttataaggtaggaagaagatgatgattaagcatgttgtaaagtcaaatggtcaagttgttcctttcgaaccagagcgtttaaatcgttggggagagtgggctgaccgtttaggagttctttggtcagaggttgttttagaggctactaaacgttgtcatgatggatgcaccacaagagaactccaccaagcaatgattgacgtttgcattgataaacaatctcagaactattctgatatggctggaagactcttgataggtttgatttacaaagaagcttttggaggattcaccaagattccaaccttacaagacttctataaagggatggtctctaaaggtctttgggaagaaatggactactcagaagctgaactgttggtactggcaaacttcatagaacactctaaagatttggggtacggatacgcagtgttgaaacagttccgtgataagtatggtattaaagatattcgtacagataagttgtatgagtcaccacagtttatgttcttgggtatggctatgaaagcctttgagaagcagcctaaagagcggagactggaagatgttaagaagctatacacttacttatctgacttgaagataaacgcacctacaccgtatctgaatggtttaagagcacgtaagacagggtatgcttcatgttgcctgattaaagcgaacgatacagctaactcaatcggggttgctacccatattgcttacgaaatgacaactaagcaagctggtattgggatgtttatgaacctacgttcaattggtgacggtattcgaaacaacactattgagcacatgggtaaacttggttattaccgtatggttaaagacgctgtacaggccaacaagcagaaatcacgtggtggtagtgctaacgtattctatacgatgctagaccctcagattgaagatttactgcgtttgaagcacccaactacagctactgcaaagcgtatcaatgaaatcgactacggtgtcattatgggcgatgctttcttagatgctgtaagacaaggtatgaagtggcctttaatctcggttaaagatgcacctgaactatatgacctgtacattaaaggttctgcggaagagtttattaatgcggttattgagagtggtgttgtgccgaaagagtggaaagatgcacgtgagttaatgcttctgtacacaatcaaccgtgtagcaactggtcgagtctatcctgcatttagtgggaatatgaacagacatacaccatttaaagagttgctgccaatgtcaaacctgtgtatggaagttgtattaccagtttatggatttgaagatatggttagcttacattcttacaaggagaatcacaatccagaagtagatggtgaagtagctctatgcttccttgcaagtttggttgctggtagaatctctaaagaagaatatgaagatgttgcttactatgctttggcaatggttgattcagtaatggatgaaatggactacccatatttgtctatgaagagaactgtacaggcacgtcgctcagtgggtatcggtatcacaaacgtagctcactacatggctaagaactatgtaacatattcttcacgtgctggtaaaaccttgcttcatgagttagcagaaatgcattcttactacctgcataaagcttctttacgtttatctaaagagcgtggtttagcagaatggattggcaagactaagtatgtagatggttgggttccacctcatacagctaacaaaatgattgacagccaacatgacgctaagttacagttcgattgggaagagttgtcacgtcagattaaagagaatggcggtatccgtaacagtgttctggaagcatatatgcctaatgagtcttcttcattggctaccaacactacaaatggtatctacccaattcgagattttatcttgactaagaaatctgcaactggtaatgtgctgttcatcgtaccagactatgaagagttgaagtacatgtatgaaattgcatggaatattccaaccagagacttgatagattgttatgcaatcttccagaagtttactggtcaagctatttcagcagacttctacatcaactacgctaaactggtaggtaacaaagtgtcagctaaagagtttatgatggacaccttgtatgcttggatgatggggatgaagacacaatactatgtaaacagtatggttggtgttggttcctcttctctgcaagaagcttactgtgaaggttgtggtgtttaaaactattaaggggtctttcgagaccccactttaaagagggttaggaaatgaaaaatgtaaacgcaaacaaattacgagtggttgtatcacgcaatacttttggtaacccaacttaccagattcagagaaagtctttcatgttcttctggaaagattgttttgcagaaatgcactcacctaaaaagattcgtgaagttctgaaatcttggggtgtaaactataaagatgttaactacgttcaaaagtaaggataagtcaatgaagaatcaaaacccaattttcttaggtgaaccactacagatttacgattcaattaactgtcactatcctaaaatctttgaactgtataaacagcagaaagcacaagattgggcagaggacgaatttagctttgaacagtcacgtattgacttccagacttgtccagaagcttctagtcaggttatgttgaaaaccttgatgtggcagtgggaggcagattcacgtatcagtagaagccttgtagtggcctttgcaccgttcattacaaactctgaatacagtgctgcaattatgaagcagtcagagattgaggttctacatgcattaacttactcagagattatccgtcaatgtttaggtgaccctgttcagattcttaaagatgttcttgagaatccacagattgaagcacgttcagaagcacttgataaagctttgagtgatttgaaaactgtagggatagagtatcagattcatggtgataacctagtaaaccttgtaggtgataaacattacatccgtaaagcaatcttgaaagggttgtttgctgtaatggcacttgaaggtattgagtttattgcatcctttgcttgcacctttgcactggttaagcaagactggtttgcaggtattggcaatgctgtacagaagattatgcttgatgaaattcttcacactaagattgacttagaagtgttgaaagaaactttgaaagatgaagactggcaagaagcatttgaaatcgtcaagccagaaattaaacagattcttgatgaagttgttttgaaagaggaaggttggtcagagtatatcttctcagaaggtcgctctatcttaggtctcaacactccacttctgaaacaatgggtatactacaatgcttacccactgtacagtattttcgatattgaatttgacttcccaatgcaaacggcagacccgttagtttggatgaaagagttcattgaaattgacaagcagcagaatgctaaccaagagcaacaaaatggtggttatctactaaatactgtaaaaaatgatgttgacaatgagccttggattctctaatatacgcaacacagaaaattagtttaaaaggagacaataccatgtatatcatctactctaagaatggctgccctaagtgtgatgttgcaaagaacatggcaaaggcacgtaacattccacatcgtgtaaaaatgctggatgttgattacaccattgatgaagtgtttgaaattgcaggacaaccaattcgacaaatgccttacatcattaatattggtgaggctggaacaattcgacaagttggttcccttgaagacttcatgaaagaagtaaataactaagtaaagatttgtaaaaagagggggctgaaaagcctcctttttgctataatagacccacgaaataaaactaactaagaggttcaaaaatgaacaaagtacgtcttgtcattaaaaaagatgaatctattgttaagtacgactttaacaagattcgttctgctgttattaaagctgctgaacgtgccaatgtaaaactttatggtgagttctggaaaccattccaagagaaagttgagtcttatctggatgagtatccaactgagtcacgtgttgcaggtgatgatgtggtactaacctatacagtacatgatttacacgtcttagtagagcaagctttgaaagatgttttaccagaagttcaccgttcctattcacaatatcgtaactataaaacaacctttgtgaagactatggatgaactctttaaaaagacccaagcaactttgtatttaggtgaccgtgaaaatgccaactttgattctacactggcatctacaaagggtagtttgattcgtgggtatctgacaaaagaactttacaaacaattcattctgtcaaagagtgagttacaagcaattgaggatggttatatctacatccatgacttacgagacttgatgtttaacactattaactgttgcttgtttgatatggaaacagtcttgaaaggtggctttacaatgtcatctattgagtatgttgaacctaaatctgtattaagtgctttgcaggttattggggatattaccctgtcagctactgcacagcaatttggtgggttcactattccagagattgacaagactcttatcccatatgtaaaacgttcttttaaaaaccatattgctgatatggaaaaatacaatattcctatggatggaaactatgcttgggataaagttaaagaagaattgaaacaaggtttccagtctcttgaaatgaaactgaacacagtaccttgttcacgtggtgactatgctttcacaactctaacttttggtaacatggacaacctaagcccatttgataatgccattcagaagatgatttgtgaagctatcttagatgttcgtatgcaaggccaaggtaagaaagcaaaacctgtagtattccctaaactagtttaccttcacagcaagaagaaccatgaagagaatgaactacaaagagaattacttgaaaaagccattgagtgcaacactaaggccatgtatccagactacttagacattgaccagcatggggcagttgcagacgcttacaagcgttctggtaaggttatttccccaatgggttgccgagcttacctgtcaccagcttatgatgataatggtgaagagttctatgtaggccgagctaacattggtgctgtttctctgaatcttcctatgatttggatgaaagccaaagaagaaggtaaagagttctttgaagtgttggagcattatcttgaaatgattcgacaaattcatatcaaacgttaccagactttagcagaaacaccagtatcaactaacccattagcattcacacaaggtggtctgtacaaaggcttcaaagacccttctgatgtgattggtgatgagattgtcaggaagtttactgcatcctttggtattactgctttaaatgaactacatcaacttgtctttgacaaacctttacatgaaggtgatgataagtttatcagtgaggtgttagcattcattgaaagtaaacttaccacttacaaaaaagaagatggttacctatatgctatgtatggtacaccagcagaaagtttgtgtgggactcagttacaccagttccgcgagaagtatggtgttatcaagggggtatctgataaagaatactttacaaactctttccacatgcatgttggggcagaactgacacctttcgaaaagcaggataaagaatttgacttcttccatcactgcaatggaggtcatatccaatatgtccgactccctaacaagaataatgcaaaagctattaaagcaatggttgagcgtgggatgggtaaaggcttctatcaaggtatcaactttgacctagcaatctgtgaaaactgtggtcaccgtcctgatggggatgttgaaaactgtccagaatgtggaagccatgacattagtgtaataaatcgtgtatgtgggtacttggggttcactaaactaaaaggtgatactcgtatgaatgacgctaagatagctgaaatcaaagaccgtaaatctatgtaaaatcttaaaggctgctcttaacagagtggcctttttcgtttatattgtccaaacattctaaggaggaattatgcgacgatttatctattggtttaaagaagaccttcttctgagagttgtcttcacacttgtttgtttagggatgattgctataatctacgtaataatagacgacaccttcaaggttgcaagatacgtggaagagaaccactgtaggacaactggaagaacaaactctataatgttccttatgccagtatttacaggagacactacaatcatggttccacagtttacagtggaaagagagtggtactgttcaaaaactgatgagagattttggagataattatgtttagcaaagttaagtatgcttaccatatgtttatgtcagatatcttccctcacaaatactacgagaaagacgggacacctaaaaagtgcccatattgtggtggtaaggatatccagtttatagcaatggattacatctgccacacaattagtgaaggatatgaacgttgcaactcttgtaatggtaaaatcatagattgggcttatggtagctatgacccatatgacttacctagaaagatgagaaagtaaatggaaaactattatattctggttggtaagagttctcttattgagaaaagagtttctaaagtttatcatgcaaagaatcatggcaatgttccttatgtgtactgttcaagaaatcatcggtgggattgggttactttagaaatgttgagagaactaggagaagacttcttgataattaagaagccatactttaatggttataaaaatgttaaaaaggttaaagtttttaaagtgaagaaaggttggtggaaagatgaactatatgaagattgacccatgtgatatgaacaatggtgatggagtgagggtgtcactatttgtatcaggttgttcacatggttgtgatgggtgtttcaacgtagaggcttggaagtataatgctggagaaccctttacagaggaaacattggaaaaactattatcatattgtgcagaagactctatctcagggcttactttattaggtggagacccattagcaccaaggaatgtagaaaccgtaacaatgatttgtaaagaatttaaaagacggtttccaaataaagacatttggatgtggacagggtatacttattctcaagtaagtggtacagaggtactgaactatgttgactacctcattgatgggaagtatgagaaagacctccctacaaagaaaccttaccgtgggtctgacaatcaagtcagatggaagaaagctggtgaaatacagtttgtaatgattgattaaggattattgaaatggctgctaatggttctgcttctctaatgatgatttgtagtgaattgattaatactcaatcttttgaagaaagagcggagttcattgaaacataccgtccaaactatgttcgttcagaaagtttgcgtcagtctgatgtttacaagcgtagacgttatctgcataaacatgttcgtcgtcgtcatgtaagactggcaacttcattgtttaccgttgataatgtttacgaacattttgttttcaagaacacggtagccattcttaataagatgtatgggacagcacacttcacaatagggcatcatatcccactaggaagaggtggtcaccatcacaggacaaattggtttatacagttaggtaaagaaaaccatcaattaggtaatgaagtacctaaacaacgtaataaaatgggcttcaagtctcaagttaaatacttaaaagactatatgaagaagcacgaagaaaagtatcaaccactggttgacttgaaagaagaacttgaatatcatcttgaattattaaaagaagtctactaaggagcatttaaaatgagcacaatcaaaaaaggtatccgtaatactcgccgtcttcaaatctacagtctgtctgcatttatgatggaagagtatgaagctatcttttgtggaaatggctatcatgatgggcagaactttatcccatttgatgaagcagttcgacgttacaacactaaagagggagatatccctaaaggtgtaggtcttgagaaagtccacctagtgttgagcaagaaggataagaaaatcatctgtaagcaacacctagttaaactgcatccacgtctacgcgagttcattgcagagttgggttcaaaagatgtattctcattcctcaagaaagtcaatctagcacagtaattctttataagggggtctattcagacccctttttcgtatctaaatatcttctgtaaagagttgtaaagactcttcctttccaaaaccacatcacgtatagttatctcatcgaaacgcaagagaggaaaacaaaatgaaagcaacgtatcaagttattattcagaattgtgaaggtgagaactttggtattgatgttgaagaaatcaagtttccaagtggtgaggtagcaatacacttagaagaaggttctttagcagcttgtggtggaattacccgtttcatgattatcacacgtggttatgaaccagaccaacttttcaagattgctctgattaaagacgctttgcaggggatggttcttatcgaccaaccattaatcatgcaaaaccattgggtactagttttaccatatttaccaaatgcacgttatgaccgtcgaatggttgaaaatgatgcacatgctttgaaggtttatggtcagatgctgaactctttagggttcaatgaagttttatcatatgatgcacatagttatgtagcacactcatgtattgagaactttaaccatgtacctgtttggagctttatccgtgggcttgataaggttcacaatatcagtgaagagtacacagctttggtagcacctgatgcgggttctactaagaaagttgaaaaggttgctgatgaattaggtcttccagttgtacaaatgactaaacgccgtgacccttcaaccggacagctttcagcaccttttgtattacatggtttagaacatttgaaaggtggtaagcttttgattgttgatgatatttgtgacggaggatacacctttatccaagcaactcaacttctaaaagtgtttgatgtagagaaagttggcttgtatgtaacacatggtattttctctaaaggtgtggatgtactgtatgatgcaggtattgatgaaatctttaccactgacacactacgtcttccagaagaatttgattcacgtgttaaagggtttcaacttattcagatgtaagtaaggttttgtaaaggggtttgcaaagacccctttgaagaactaagatacatccatcgaaacaaacaagaggaaatagaaaatgaaaatcactaaaaacacaaacacaactatcatcaaacttaataagactggtaaacttctggatatcgttcttattcaaaatgaagataacagccgtgctcaaggtcagcctctgcaaatggtaggtttatcaatccactttgaaggattagaagaaacattaaaagcttttaatgaaatgtatgaagaattaggtgataacttctataacacctcattgaaagacttagaggaagaccttgttaccatcgttggtgaagaagacttctcagaaggttacgaagttatcaacgttaaacttggtgaactacacgacttcattgaacgtatgtaattgtaaagattgttgaaatagataaattaaacagttagtataaagacacttaaataacaaaccatttgataaacaagaggaaacaaccatgaaaaccaaaatcgctaccgtagacttcaatgcaccagtaactgtacttttcacagaaaatcactttgaagatgttctggcagttaaaactacagaaggtgaggctgcactattcaacttaaaagatgttatgcaaaatgctgtcatgctgcatcatatgggcatgttggatgttctgaactcttcactggtagatatagaattgaaagtattccctgtagaggaaattattaaagacttgcaagataccattgatgattcagatgttgcaatgaaaatgaaagatatgatgctggcagatgttgttgaactttttgcaaatcttgctgtagaaaaattcttagaagatgaatttgctcagtaatctgtaaagagttgtaaaggggtttgaaaagaccccttaaaagaaatactataatcacatcgaaaacaaatacacaaaaggaaatagaaaatgactactccaatctttaacctgaatcgtaaaactaaagtacaagcaatccgtgtcgctgctgataataaatggacagatactttaatcatccacgtagtaggagaccgtgtaactggttaccctctgtctcaattggcaatgctacatatgacaagtggtggggatattgaccgcaccattgatgaaatgaatgcttttatgaacgaacgtgtcgaaagtcttagtatgggtcttgaagaaatcacagtaagtgctcaagaagctgataaagacgaaacctttaagaaagctgttgagaacggtgaaataaccattgaagattacacctttgaagatttcttagttacaattaccaaaactattttcaatatgtaaggttttgtaaaggggtttgagaagacccctttgaagaactaacatagagctactaaaaacaacgaaaggaagataccatgaatcaatcaatctttaatactcctgcacatctgaactgtgatgcttataaaatcggtcactatttccagtatccaaaaggtcaatcgcgtctgttcctgaacatgacaccacgctcagattattggtttaaaagtccattagctgttgatggtgtagtagtttggggagtaaccaatctggtgaaccgttacttgaaagaccactggaacaacaccttctttaaccgtgatgaagatgaagttgtagcagaatgggaattctacacaggtggtgttttaggtgatatcacatctacacatattcgtgacttacaccgtttagggttcttaccagtgatggttatgtcaccaagtgaaggtacagttgtccctattaagacccctatcttattggtggaaagcactcatccagattttgcatgggtagcttcttacttagaagatgtgctttcaaatgaactgtggaaaccttgtacagtggcaactattgcacttcattaccgtcgcttgttagaaggttttgcagatgagacttgtgataacaaagaccacatcccttatcaagcacatgactttgcactgcgtggtatgagtggttctaatgatggtggcactacaaacactggtcacctgctgtattttaaaggaactgactctttccctgctgtttataacatccatcaagtgtatggtggagaagtatcagatattgcaagttctattcctgcaactgaacatactgttatgatgagtaacattgcagcagcaactatgggaatgagcattgaagatgttcctaagtggtgtaaagacgcagcagataatagtgaagacgctttccgttgctatggagaatacctgtatctgaaatctctaatgacagatatttatccagaaggtatgtttagtgctgttatggacacattcaactacttccgtaacttgacagtaatccttccaaaattaaaagaagagattatgcagcgtgaaggtaaggttgttgtccgtccagactctggtaaccctctgaatattatctgtggttacaaagttgccagattcagtgatgtaaaagaacagtttggacttccttcatacatcccactgcctaaagttccagaagatatctgcaaggacttagagagtgagggttatgacttcatcggggatgagcttatagatggttcttacttagttcttgatgtaaaaacctatgaagttgaccagatgagcggggaagaaatcaaaggttctttagagctactatggaaagtgtttggtgggacagttaacagtaaaggttaccgtgtacttgacccacatattggccttatctatggtgatagtatcactctggaacgtgctgatgagattctttcacgaatgaaggaaatgggttttgcaagttctaacgtagtgtttggtgtaggttcattcacatacaattacatgacacgtgacacctttggatttgctgttaaggctacagctacaacggtaaatggtgaaatgttaatgttagcaaaagaacctaagacagataatggcgttaagaaatctgcaaaaggttatatcacagctacctttgatgtatctaacccacgtcacatcactatggaagacacattgacacgtgaagaatggttggaagctattcaagacccgcaatgcatctatcgtgcaaaattcttccaaggggtcgctgatacacctaagtacaatggtgggttaaacactactcgtaagtacgctaagttgttcatctaagacaactatatggggtctttttagacccctttaaaggagacctttagaatgcacgtagaaacgattgtacggacaaatatctctttggaataccattatgagggtactgaggatttaaagtcatacattagctctgtggaggttttaaaaggtattcataaaggggctacccttactgtatacggatgctttaaaaacttcccaaaactctctaatggtgaacttttacaaatccttacagaatcaggtatggacacagaaaccacggagtattattattctccacatcgaaaccaactagaggtagtgtggcatggaagataatttttatttgacttatgagaaaatttgcaaagagtggtttccaaatggtttaccagaaaatgcaaaagttcatgtggagagatttgcttttgaattgtacttagcaggggttgagtacgtaatcaaagaagtaagtaaagactaacaaagattgagggggaagaaatgattttacaacacaactatgaacctgtaacacgtagttcgagcttagagactgctcaagcttctattgaaatgacacctgaaatgttcaaacttcttagcagtggtttgtatcagtataaagaaagggctgttattcgcgagttatcttgtaatggtttagatggtcatgctatggctggtaagaaggatgttcctttagatattcacttaccaactcgttttgaaccatactttgaagtacgtgactatggtatcagtatgaatcacgaaactgtgatgaagatgtacctgtcttatggtgcttcaactaaacgagacactaatgatgcaattggttgctttggggttggttctaaatcattcttctctgtggctcagtctgcaacggttacagcttggatggatggtgtaaaacgtcaatacactatctacatggaagaaggtatgccacaagtcacaaagcttatggaaatgccgtctgatgaacctacgggattctctgtacgagtggctattccaaatacaatgattgggacattcttccaagaggcttgttatgtttacagtttctttgatgtgaaacctaactgtaacatcgagttagattactatcacagtgattatgaattggctttggaaggtgagaagtacaaagcttacacttaccatagaaagtcaagctggtcagaacctgacattaaaattgttatgggaggcgttgcttatgactttgagctagacacaatctttgcagaacgtcaagagttgtgggaattgattgatgaaaatcttttcaaagaatataaacttattgagattcatctgcctattggttctgtagaggtagctgcatcacgtgaaactttgtcattcacagaagagacttatgcttacattgtaaatgtaattaaagagtttgctcaaagtgtcattaaagacctacaatctcaagtagatgggtgtaatacttttgcagaacttgcagaactacgcaatgattggaagagctgttatgaaaagaaaactctggtttacattgacaagagtctagttttccgtggtaaaacagtagcagattgggttcatatttttacgtaccgtcacgtggagtttcgtaagaataagcttggtaaacgcttcccgatgcgtaactatcgtggtgatgaagtatgggatgattacggtaaagttgtctatgcacatgatgttatagatttgggtatgagaaagattgagctacgggacttggaaggtaagaagccaaccttatctcctgtggttgacaaacactcatacaccccattctcttggtattggaaagaaaatacttttgatacaaacatttttgtcattaataatcgtaccactaaatctggtactattaagacaactggtaatatgcagattatgaaagcaattgctcagggattttctactgaaaaatctgtgagtaacccgactgtgtggactttccctagccagaagagtctattagacttcttcaaaggtattggaataccacgtgaaagggtcttgaaaaataccttcttgttagcagaccacgaagatttgtataaaccagttcgtcgtgtagctccacctgttaaaatggtggttattgaagagggtacaaagtatgaggataatatctgcatcaatgatgttaaaggtcagcagtattacattcgaactgtagggaatgaggtgattagctgtggtataagtatctgtaatgattctataatgtcactggcacgtatcttaggtggcaagatttatgtattccgtaaatctaattggaacaaaattccagaagattgggttgaggtcacagatgaagtcattgctgaaaatctgtttaaagacccttaccaactttaccgattatcaatgcgtctaacacagaatatggtacgtggttattatccaagttatgattctttacggatgattctttcttggggtggtaagttcaaagcaccttggataccataccgtagacaagaagagtttagccacatggaagataatattcatgtgattgagaagtaccttggacggttccactatgtagctatgtcagacaacttgtttgaagatacccaaagtgatgtctacagtgttgcagagtatgtgttgacatacaatcatcctgctaaagcacgttaccacgctatcaagaacaaattgaagaagaaaatccagaaggatatggataaatttaaggaaagaaacttcttgtacagtttgattgattggtataaagtgtctttcaaagaggtggtagagaaagacggtggtatcaccatgaaaggattaagtgcagaagctattaagaaatgtgtgtattaatagttgacagataaattttaaagtggtctaataaggccacttaaacaacgaaaccaaatgagaggaaactaccatgactaagattcaaattgatgcagcaatctatgcagacgttaaagctggtatcatgactaaaacagcaatcgctaagaagtacggtacatctacacgctcagtaggacgtgctgtagaacgccatgaaaaacgtatggctgataagtctctacaacaaactgtttcactcgctattatcaagcgacctgctctacaagaggttgaacagaaacaggagttcatttatattgacaaaacctcaaatagtgaacttgtagttggggatgttgttatgctatctgagcacagtaattggcctgttgaggaatctaatccacgtggagttaagggtgtaattgatgagcatgaagaaggaagcccttggattcatgtacaatggtctaacaagagccacaatgcttacaggagtggagataatgatttaatcctgttagagcgtgacggtaagattgttaaaccaacttctgaaaaacctgctaatgatatccctgctttacaggctgatgatgaagtagagattgaagtagctgaatcatcattgatggatgcactgaaaagtggtgaccgtgtagaatatgttctgacaggtgacagtgtcattctaacaatgaataatgaaactgagattgttgacagcactcaccctaactacaaagcaatccgtgaagcaatcttcaatgaagacttcaaagctgcttttgagttgatgaatattcgaaaagctatcgaaacattcactcaaggtaacatccgaattgaaggtgaaaaactcttctacggtgaaatgcaggttaaaactgaattggctgataaaatcattcagttgatgcagaaaggtgatgatggtttccaacgtcttatcaagttctttgaactgttgatgcagaaccctagccgtagcagtgtagaacaattgtggggattcgtttgtcacaatgatgtagaaattgatgaagacggttatttgattggttggaagaaagtgcagtcaaagggtaacaacctgtttgatagtcgcactggtaaggttcctaacaacgttggttgtgtagttgaaatgccacgttggatggtagacgaccgtcgaagtgttacatgttcacaaggtcttcatgttggtgcgtgggattatgtaagaagtttctctggtaacgtgattacaaaggttcgtatgagtcctgctgatgtagtttctgtaccagatgattatgacgatatgaaggttcgcacttctaagtatgaagttgttggattggtgaatagttctcgccaagatattccaaacacttatgaatacaaacgtcaacatgtaatggttggttctgctggtgaaatcttaggaatcaaagatatccagtaatctttaaaaagttttacaaaggctgcccttcacagggtggcctttttcgtttatattagttacatgttttctacaagaggaatagaaatgtttttagaagcgatgctcaagacagcctttgcagtaagccttttagtatcttcccataatgcggaatcaccaattacaaagcttactacaaagaccttgcctgaaagctgcccgactttaactgttaaccagattaaaaccctcaacatgtcttaccgttatggggaagaaaaccttggaaaaggttggggtaaggttatggtagggattgctcacagggaatctcaattaggtgttaagctaatcaacaataaaaccaaagactatggtgtatttcaaaaccatcttaaaacagtggtgaagcgtaataatataaagttccctgcaaaggctaagaagagactcatcaatgacttccactattcagcagatgaatcaaggaaagagatagagttttggaagaaggttcacggagagaagaacatcaagaagattcttgccagttacaatgcaggttacaactataacggcaccaaagggaaaacctattccaaggatgttttaaatagtatgaaacttatgcaagcttgttatggtggtttaatgatgtaaggttttgtaaaggggtttgaaaagacccctttgaagaactaacatgtaccacatacagaagataaataaacaaggggaaacatcacaatgaagaactcaacaattaaacctactaatgttgcttatataaactggaatattaaggaagttgtaaaaggttatatctattataaagacctttacttagtctctgagtcagaaccagaagtaccaatatacaatactccacaagatgattttccgtcatacagcatccacgtagatgatttgatgattatgccagatgtattctatgcaaataaaccaaaagctattgtatgtgacattgatggtgtattgaatacttacaagaaagagaaaggtgtgctcttgaaagatggcactcatgaaccaaactggacacagttctctaagatgaatgaagtagaacctgttaagtttatgtttgaaatgcttattagcttcttacgcagtcatggtgcagattcacgtatcatctttatgacagcacgtggtgaaacgcaacgttacttaactgaaaaattcttagaagagaacatgggtgagtggtattcaagaactcttttgtttatgcgtgggcagggttgtaaccgtaaaagtgctgaacaaattaaagtggaacgtatggctggtgcagttctcccatactttgaagtagaagcctttatagacgacactgtagaagttatcaaagctatcaatgatttcttcccacatatcactacaatgacagttaagccaaaagcttaataaggttgtgaaatgaaatttataaagaaactgtttagctttattgcatggttattcttttggggaatgacgattattacagcggcctcccttaaccatttaataacaactggacaaattgatacggataccccaaccatccttgtaggagtgggaatattcacagtaatgtactggttgactaaaggtgtaatctttgcagtgcattacctaattgatatcattgaaggtttgtttagagggagtgtaagatgaaacgtaaatctatttataaaatagcaataaacctgtggaagcgtcgatttgaaagcgtatgcgactctaaggttagcccattttggagaaaacgtgacttaaaaggttttgtccgtcagatgggtattcacacggcagattggatgatttatgaagtagctcaagagatagcttaccgtgaagctggatgtaaaggttggtcagttgagttctcaaacttctttgcagaaaatgaagaactttttaaagagtttgctattgaagttatctatcgacaaactcaagaagaactgatagacgcactacaagaatcaatggaagcagaaatcgacgcaatgtacagttaataaggggataaccatgaaatcagttcatttagtaatgtcagcagacaaagataaaaagatggtagaagttgcaagcattctctactcagaagtcagtcgaaatgttgacttccaagccaccactgtaaagaaagataatagtgggatgcgtagttttaatgctgttattgaaacaaacatcatgaaagctttacgtggtgataatctcactattactgacacagatatgatgcagtatcgaactttacacctgccaactcttgtaagtttggagttcaaagagaccatctatctattcattgatgagattgctattgggaaaatggcactaagtgatgataagaatgtggtggcattaggtcaatcattgaaaagattgttatcaactcaaacaaccttagtaaatgcttaccagaatatgttaggctaactatgaaagattggtcacctttatggtggcctttctcatttataggagaagagaaatgtcaagttatgtaaagattattgcgttagtaggtttgataggagtatcattcagttgtgggtacaaatggagggattaccaaatagttcaagaaagactccaccaagaagagattgataaagaagctaacaaagctttcttaaaaggtcagacagaactacttgatagaatgaatcaatctttgaaggagtttgacagaggtaataaggtaaatgaaaagacaatcattaaagagaagactaaaactgttttcaggaatgtttgtgttagcgatgattacgtcaggatgttcaacgacacatccgaatcaggtaaatcacaactacctagtgaaacaaagcgataagatttatcaagaagatgttgttggaaagggtgctgtaatgtctggtacaactggtgaatcagtcactgacacagcagagttttacagaaacaagttctaccaatgtgcaattaagtacaatggtttgatagacagaatcttaaaggggaatccaaatggctgatttttgtaagaaatgttctattgaaatgtttggaagtgatactaaagaccttgaaggtttaatcacagaagaacaattcaaagctggttacgctgcaacggtttgttgtgaaggttgttgtgcagggtatgttgaccatgaaggtaaccgtgttaaacctagtgaggatggtgagtcatgggttcattactaacacctgaattgtatagtttcttaaagtttgtggcagtattggttttcttaggttatgtttacagtaaagattaacagcgtgaggtaactactatgaaactgtttaaaaacgatgatgcatttggttggtcaatggcttttgcagtagcttgtatcatggtaattttcttatcttctgtttatattgcagtgggggtttaatatgtcgagtacagtgtacaaatggatgttgaatgatatcggagaaggtgagctgaaaggtgtaacagaacttattgaagacgaatctggttggggaatggatatggtctacaacggctggaagaagatgtgtctacgaattgcagaagaccacggaagacagccagttttagagagtgattaccatgtatcctccacaaaagataagcctaatactcagcatactatgaagattatggggacagatatcatcataggtactctggaagttttctattaagtaatgttttgtaaaggggtttgaaaagacccctttgaagaactaacttataaacataacgaaacacaaaggagagaagaaatggctattacaagacttatacacggtgacttaatagagtttgccaagagcggtgcctttgacttgattggtcacggttgtaacacaatgaacattatgggtggtattgcaaaagtgattgcagaagaattcccaatggcttttgaagcagaccgaaccatgcatgacaaatacaatttacggtatcgtgatacaaaaccccacgtagaatgtcctactatggctggtcgtatgtcacatgcttacgtcaatagtggtggtggattctatgtagcaaacctatacactcaggtttatactggtcgtaatgcaaagtataaccacttagcagacgctttgcacaatcttaatgcattctgcaaagagaaccatgtgcaaaagattggtctacctatgattggttgtggtattggtggtttgaatgagttcgctgtcctgaacttgattagtagcataattgaagctgatgtgacaatggttattcatccagactcttatccaagtctttcacactttgagtttaaaactagtctaccaaaagtttatgacgggattctgatgatagacaatggtggtaacacttttcaattgaaccctaatccaactggtttagagttacccttgataccaattactaatcataagttctgtccagttaccctctcagtaacccctgttaatcgttttgtaggtgggtatggtaactttgagaatgctctaaggagttttgatttaccttatgatttcttgtacttctttgtcaatcctaaaagagatattcataaactgaaacgtctacaaagttttaagaatattcgttgggtagacgttaataaaatctgataagtaattatctaatggcatccctactaaggttctggtaggggtgtctaatgataagctatggtcagaggacacgatagaaaatctattatgaaaacgtgcttatgaaattaattttgtcaagggaaacgatagaaaaatcattttcaaattgtgcttataactagggacacgatagctttttcattttagaatcgtgcttataaaaagaactggcaggagacaggcgagctttttcattttagaatcgtgcttataaaaatttatagagaaaaatctgtagagaaaaatctgacacacacacaaaaccccatcaaaagtcaagcccctttacaaatctttacaaaccctctttacacttctttacaaaactttccttgcatactctcacccatcacatcataatggcttcaacgaaacgggaacgacccgacaaactaaccttaatcaaaggatgtaaagatgaaacgtgaaattaacgcactagtaaagccactaactaaaacccaactaaaagcacaaattgataaaggtggctcccttgataccgtctacaaagaatgccgccgttatggtgaaatcctttacaaatccgattatgaatatacttatacagttaactttaaaaccaatgaaaaagttaccgaccttgtaacagaaatttatatcagctataaggatttatactggcattttgaactggtaaaaggtgaagtaaaaacagcaggttggagcattaacaaaccagcggtagtggatttgtaaagaattgtaaagacgcttgcaggggttgtttgattgattcataatgaccccatacagaacgaaacactaaaacctaatcaagaggatttaaaaatggtatcagctaagactctatttaatacagctttacagtttaataaccgtaaaacggcagggttagcacaaattttgtggaatttaggaatggtagaagctgtaaaggcaaaacatccgctttacttttccaataaaacgtttaaagtaacttcacaaactaactaaccaagggtttaaaagatgagtcacaacattagaatcactgtaaactttgaagaaatagctgtatgtaaatataatgagacctgcattattctaaataaacatacgcattcggacttttgggatagtaccgatgaaataaccgagtatgagattaactataacggtcacataattaaacgcgatacaagagagcaagccgaaaaagattataaagacttgtgttatatcgtattctcaaagataggggtttaaaatggttgtttacgttgtattctttaacaactttaacggtgatgatgaatattgtggggtgttctcatcagaagaaaaagcaggggaatatatagaaagattctcaaaatatgaacagtctagttttagaattgaagaagtaacccttgatgaaatgctgtgatttgtaaagttttgtaaaggggattgattagtcccctttgaagagctaatatgtaccacatcgaaaacaacaaaaggaaatagaaaatgaaaaacgtaaatattgattcaactgtgattgttagcgtagacgtaaactttaaaaagcttcataataccgtagcatttaaatatggcgataacatgacagcgatttatcgtttacaagatatcttaaaaggtttattcctcccattcatgcttgaagatattgacgcaatcaataaagagcttgaagaaatggaaccatcggcaccactaacagaagacaaggcaaaagaagcctttgaaacactggaagcaatggcggccattggcggttctaaatttaaccacgttgaaaccacactacgtgagctaatgaaaatgtttttccaagatggaaatgaagatttagaaaattttattgagttacacagcgcaactatccactaacagagttttgtaaagttttgtaaagggggttgcatagccccctttgaagaactaacataaacgtattgaaaacgaagactaaccaagaggattttaaaaatgttgcatttagttactggtatgatgttcggtttcgttgcaagtgttaccactatagacggtgaaacattcttattaaatgaacagtatgaaacccaatcaaaatgcattgaagaaacagtctctttagttatggatttagaaaatgacaatgaagtcaaaaatgtaaatgtgattatggcttgcgaagaattgaaccaagattgatttgtaaagaattgtaaagacacttgcaggggttgtttgaataggtgataataaccccatcgaaacaagagaacgaaacactaaaactaaccaagaggattttaaaaatgactactaccactaaactagaagaaacttttatcatgatgaatgctttaaacgtagctgcaagcatgacagtgattaaaaagcagatagaaaactttgaagacgctttacaattctttaataatgttagttcaccaattaaaacagtttacaacgaaatggtgaaggaataccctgagttgatgttacatgtaaaagaaggttataagaaaaaggggtcaaaactggaaaatgtatttagcgcttataaacaactcattaaattctacggggttttgtatctaggactctcaaatagtgcaagcgagttattgtatcagcgtttacgcaagagtgaagcatttagcggtgaagattatagcatggtgtctggttggtaaatggccttttgtaaagaagtgtaaagacacttgcaagattaaactaaaaagataataatactctcatcgaaacggggaacgaccccgaaaaactaaaacctaatcaagaggattttaaaaatgactatgacttacaactcaatccagaaaaacacctttgcaactttagctgaaaacatttgcgggaattctcagtgggattcactagacgactttgaatattatgtaattgatgatttagatgttgaagtaccagaagtaatttattaccatgatgcatggtcaatcattaatgacagtgattttaacggttttgtagaagatgatttagattttagtggttgtaaatcagcacaagaagctgtaatgttagaagcaaattctatgatgtatggggtaggaactagtgttctaggtgactttaaagatgatttttacggtgtcttgttagcggttcgtaatttctgcaaagacaaaggttttaatgtgacccgtgtatactgtgaaatgtcttgtcatttggattgcttgccacataactatgaagaagattttaacgggttcactggctgcatatgggaagataacaacactttaagcgtcgatgttcacggtgcaaaattgattgttgattttgtaaagtaatgtaaattaggttgttttgtgaaggggattgccagataatcccctttgaaaagaaaacctaaccaactaaccaagaggactttaaaatgcaaatcttatttaaaactcgtcaaaatgcccgtaatcataaagctggtaaaattgttgataatggtaaatcttctgtaaaacgctggggaagagagcttaatttgaaatctcgtaaactggcaattgtcaaagtggaatacctaaaaggttatgagaaaaagcacaatacaaaagtgtcatataagagagcttttaacgtttaattattaaggaggatgattaatatatgttatatgcgttttgtggtttggctttatttgtggggcttttaactgttaaaatctcacaactatctaaaaaggttgatgagatatcgaaaaagaataccagaagcgaaaaggttaaaccattcttacaaggtttgaataaagagcagttacataaattgcaagctgctgtaatgtttgaaggtgatttttatagtgaattcttaaactcactgacagaaaaacaacggtttgattatcgtatgatatgcaaaacccttgaaattgataattttacagaagaggacttaaaaaccgttctgtaaagagttaaagaggctgcctaaatggtggcctttttattttctactcccaaaactttaaacatccaagctataacccctcacaaaaccccctaaaaagcccgctataagcttttcaccctataacctacccaatcatattaataacccttaaagcgtcttatagaggcttatagagagattcactatttagattctctttacacttctttacaaaactatgctttacaagatttaaaagcatggcataatgacctcatcgaaacggggaacgaccccaagaaatcaaaatgaccactaatcaagaggattttaaaaatgactactattgccgacctgaaaagctacgttgaagaccgcattgtagaagagattgaattgtcacagggtagccgttcaactgttgaagatttaattcatgaaatttgtgacaatgccgttcctgtaatgtatagtgaactcgcagaattaatcacagactcagattttaacgatgatattgatgatatagagtgcgcaggtaacaacatctttaaaattattcagtggggagtctataaccaattaacatcttatgctaatgagattctagacgaaaaaatcgaagagtgggaagagtcacaagaagaagatgaagacgaagaagaagaagaataaaaacaacaacttatcagagttttgtaaagaattgtaaagacacttgcaggggttgtttgattgattcataatgaccccatacagaactcagagagttggaagaggttttgtaaagttttgtaaagggggttgatgaatcccctttgaaaagctaacatttaccacatcgaaacactatccactaaccaagaggatttaaaaatgtcatatgtaacacgcaacggtgaagtaactttttatgttcgttcaactggcgaaactgtagacgctatccaaaaacctttagattggcaaatcatgggattgtcaaagactgctaccggatacgggaagaaaatcccaacatcattaatgattaactatgaaggccgtttgcgccgtgtttatcaagatgtttacagcaatagcggagtaagttacatcattgttaaaggtcaaaaagttacactggcataaacaagttttgtaaagaattgtaaagacacttgagggggttgtttgaataggtgataataaccccatcgaaacaaaacactaaaacctaatcaagaggatttaaaaaatgactaaagttgaagcaatccgtaactataacgaaatgtttgcagaaatggtttctaataacccacgtttaatgtcagacattgtagcttatcgttgtggattctgtgattatgttgataacttatatcgtgatggtgaaatcacagaaaaacaagctgacagttgggctgttacaattgagacagtgagaggactaaaaagaactttttcaaaatacgcccaataaatagacttttgtaaagttttgtaaaggggattgattagtcccctttgaagagctaatatgaagtcattgaaaagcagtacaaactaaccttaatcaaaggatacacaaaatgactaacaaaaccccattcagcaccttaacttcaatccaacgtttgactatgaaaatggaatcgaactactggatgtatcttgaaaaagttaacggcaaaaacatgattgtttgcatcgaaaagaccgaaaaaggttatgaagtaactaaccttgatgataattctttctatggtatcggtaaaaacttcatgcaagcaattgcaattatctataaagtaaacactggcaaaatctcaggtaacaacacagtgaaaagcgtcaaaactcaggaaatcactttaaaggcagtctttgaagaggctttacaagaagctaaagcagaaaaagattcggggaaatcatgggctattaaagacgtttacagagatttgttagtagttaccggattagaccatcacacagcaaaatcaaagcaagatttttctaagggttatgtattaacgagttatgcaacatcaaaagctttagaatacaagatgattattgagagcttagaagagagcgcctaaaacagcctagaaagcgattaactgaaaagggggagcaatcccctacataaacaaataaaccactcacaattgattataggacgttttaagatgcaaactttacataacccattaggattgtcagcacttgcccgtaaatgtatagaaaaccctgataaaagttatttatttgtatgtgaagacccaaaaagagactatcaattctatcaaaaatcttttaaggctatagctagtaagttaaaggttaaaattagcttatcaaaagtgttgatttgtgaagaggataatgtatcaatcaaagcaatgcgtgttaggttgggtaaataatggccttttgtaaagaattgtaaagacacttgtcggggttgtttgagtaggtgataataaccccatagagaacgcagtgagcgttttaaagaaagaacattaaacactaatcaagaggatttaaaaatgaatcgttctatcaaagctggcgataatgtaatggtgaagtttaaccactcaatcaatgcccctgttagcgctcacaaggtacacacagttttagaagtgtatccagataaaaccatgttattaaaaggttttccagaacctgtgaagcttgaaatgttcgataagatggtgattaaccgtaaagcaatgaaagcttataagtaaacacaaagccaacaaaacaccaaaaccactaacaaagaggattaaggaaatgaatagcagcgtaaaagttaactttaacggaactgtaaaaactttgaaaactgttgcacaatataaccgttttaaaagagagttaacacgtgatatcatcggactacaatcaaaacgtgaagaagaaataaaagggttgtccttaaaggataaggtagaatatcagcgcaattacaacactcaaaaaagagcattagaagctgtttatgacaaactagccttaaaccactaccaaatcattgacgttttagaaaaccgtggtgattctcagattatgtacctgtaacatgtaactaaatagaaagtttaccccgtatgaccacaaaagattaactttgtcaatggttgtacggggttttttattttctcagtgtttataaagacttatagaaaatagcactttttgctacttgacagcagtcttttagacttgacaagataacccacgttctgtaaggttgtaactgttttcttttctttttcttgtttttcttttcttttaagtcttaatcttttatcttataagagctattaagaagactttaaaaagaccacttaaaaacctacctttaaacctccaatcaatccaaccaataacaacaaacaattaacacttataagcgcgtcgaaaaagaccccttttaaaaccctttttaacaatcctttaaaccctattaccaacatagacaaacaaccaacacaagaaaccctttaaaacgctctataaagccctgtaaagcacttttaagaccatagacaggtaatcacaaggctattgattaaaagccccttaaaagcccttataagaggttttattgttttggtcacatgatggttgtttatgtgattaacttcccacggttaaacccattaacaaacaccccataaaacacaaccacattaaaacaaccttttaacaagcctttttaaccctgtgacccttagtagctctcaactacaaagaatagacaaagacactgtaaagaccctacaaagaatagactgtaagaagccttaaaagaatctacaaagaggctacaaagaccctacaaagggagactgtaaagacactacaaagaccccttaaaagggttgttttaagaagttctaggaagatttttaatggttatctaagtagattcttaacggttatctaatgagagttttaacggttttactacccacctccacatactcttgtcaagaatctttacataaaattacaaagaaattgtgtaaagaactgtaaagaaggtttgtaaagactctgtaaagaactgtaaagatatgtaaaaccatgtaaaaagacttgacaatatcatgtgaccatatctatacaatcatctgtaaagaattgtaaagaatcttgatagttttcttcacagtgataagatgagagaggtagaagagaacctttgaaaagtctgtaaagatttgtaaagagacttgacaaaactcttttaagaacaagctactaaacatttgtaaagttctgtaaagactcttgacaaactctataaagaacctatgtaaagaactgtaaagagtgctctgtaaagaattgtaaagagtcttgataaatttctgaaaagatggtacaccatagatattttaagattttgcaaaggtactgtaacaatctgttaatggggtactaagcacctatctacagattctctaaaaattctcaatagttccttaacagtatctaaaaagaacaggtttttacaggtatctaaaaagaccctagatatttcttctaagccttactgtgactagcttttagaaggctaccctgtttaataataaaaaatatatttttacagaatctttgtaggtattaccataagaatatgatgaacccataggtaaaaccttagaagagttttagaagagtcttaggaggggttttagaaggtattttgaagtggttttagaaaggtctgtaatgagtctgtaaagtgacttgatagaaatggtcacagtaagggagggaagtggtactctcagatattttcaaactaactgtgactagcccataatagtagaacccttactggattttataaaaattctaaaagtgtagattcttataggggtatgtcttttatcatctatgcttgataacgatacaaccgtgggaagataactaggaaggtattgtagaagggacttatgaagataactgtcacttggtcttatataggttgtcttataaaactttcagagactagctcttataacttctgtacaaataagaaagagtcttaccaaagactgataagacccttataagtatatctatataatatattatgtgacttgctttagtaatggttgttacttaggctattttatgtttttaggataaccatttttaccatatgtttcgaaataacatttcacccacatttcttggaaaaccctcttatccatacattccattgtcaacttgtgattctcttccagttcccttttaaccttgaatccatccttagcattgattgtgacagggagtagccccaatacaaaaatcactccaaacatgatggtttcaaccatatcaagtgagtcaatccctttcataaagatagcaatacaagagataaacatcaacagtagaaacataacaagtgacttactcaaacgcttattagcactcttataggacttgtaagagtctgataagttctccatacgaagattacgagtacggtgtaactcccaaatcttattaaatacctcactcaaatcttcttgtgagaaatgctggatagctgcaatgttagttttgaagtaatagctattcttattaccgtcaagcacagttgttctggtaacacttcctgtaaagacttcataacctttaacaagagttctgtcaccaatgacagtaactgattcaacaaaagtatcgtacacatggtaattaccttcaccatctgctgattcagacactggttcaagactgttaataacattgtattcaaaatctaataagtaactcttgtatagcccacgctcaataaacaagatttcaaagtctttgtagttctcaatagagtgttcttccactacaacaatctcaacaccactgtcattaacctttttagtggtttctgatttaataactgtcatgatttatcccttctctttttagttggtctatttggggctactaaaattttcggcgtaaccccttgtaagttgtctgaactggtttggccttagaagatttctactttaggcttgatgaaaacatgtttgagagcactcagcatggcaaccatccagtttgtacgtttcaccagacggataactacaccagtattcttgtcttcataaataccataagattcatttccaaccttgaggattgaagagatttctctaccagtgaatgggtcaacatactctgcactgatagcactttctgtaactctcatcacagtaaccacttgtcgagacatataagtcacacctacagcctctttctcttcaattacctcagcaaagtaatattcagtgttattgaatctcattactttaaactccacaccatcatcaattataagaaccataatacttttccccctttttcctgttacagacactataaaggtctccacttaaaaagagaagaccctttacagatatttacttagccttactaatctttggttttggataagaacgaagaagactcatcataaaatcatcctgtctccaaggttggaaagaaggaattgattcctgaatcttgtcaataattggagaaagaacctcatcacgcttccaccaatactgtgaagcaggtgagcagataattaattgtttcttctcatcaatgattggcgaatcagtatcacgaaaatactgcataatcaccatgccattatccatgtgcagttcttttacatcaactgctgccaaagcttcatataaactttcgaagtcttttacaaggctgacaatgtttgtgctaggtaggatgtgaccacctttacgttgcattgcaacaatagccttttcaatagtgcaagccacataagggaaaagatgtgcttttcgatgtacggtcacagaaatatggtttacaccaattgtagcctcaatcatttctttaccacagtcacatacataagcctgaatagggtcatatgaaataacgctttgtgggatactacttgccatttgctcgctcactgttaattctccttactttgtccaaaaccttttcaatttctttgcaattcattttgaaagccagtagattatagacagattcagctacagtatcaagtttcttttcttttgctgtttgaacgtctacaccatcaccatcaacaatcttcaaacgatatgccaaagatttacctttacgatttactaacaaatcaccgtgaaaagtaacaatctctttgtcttcacatataatcacttggcggtagatgtattcttgtgtaactctatcttcaatcagagtaacctctatgaccacaccctctttatatgtctcattagtttctatgtcatagataataacgtttcttccaacaagacttgtataaggaattcctatacgtggattgaaaaccatcttaggaaaacctgcatcagccaatttgtcatagtctgcgttcatagttaacctcttatcaatcttcccactcttcttcatcattaatctctacaacagctaaagcatgtttcttcttagtgtcttgttgtagaatccaaaccccttctgcactgtatttcaattcaccacttataaggagttctgacttaccatctacaccaatcagtttaatctctgtgtaccaagaagtcttgtagtagccctccatgttacgagttgtgacaacactatgaataaaaccttcaaagatagcagtatcaccaactggttcctgcttttcaatatcataaggcataacttctacatagttcgattttaacttgaacattttaagcaatctccataacatctgagtagatacggacaaaaccctgaatgataatcatacctttgtaagtaattgcgaaaggtaagtaacagtaattgtcacgatacttgaaatcatcaagagcttcaacacgacacttctgaacactgacgacaccaccgtattctttctttgcaacatctttaataacattaatgagcacttcatcagttggagtgtcaaccatcttaaaaatggtctcaccacctgtgaatgaaatagaaacattgtagtccatcttcttctccttttgttgttaggttcttttgatgaggggattatgaagagaaggggcaagatttgcaagcccctttttgtaaagaaatgttatttagactggtagataccacgtaggtacatatctgcttcacgaatacgtctattgagtaacccttgattagtcactttacgtccgttgacagtaaccttacaccacatttcaaaagcttttgcacatccaatcttatcgccagctttatgacgtttcaggaaggttgagcttctaaagtttgaaacaccgatgttgtagcagatgttgactagagcatcatattcgttctgtgtggttggtacacctgcaatagctttgttaacttccatttcaaagacttttaagtcttgacgaagataacgttcagcttcttcaacagtacacaccatacccatcttgacaggaacaccgttgattctaattgtaccatacccgatggtaggaataccagcagagtctaaataagctttactgcggaaaccttctgacaatttaatgtcattgataccacgttgagagatttggaacattattacctcctaaaagaaagggtctccgaagagacccctatttagagaattaagaagacggagcttcaatttgaactgcaaaggtgcaagacttagttccatcccttacagacgtacaagtaaccccatagatagcaggtttatcagatgttgcagtgattgttaaaacaccattaccattatcagctacttcaatattaccttttgctgcttcatcagttgttgttgtgtaacgcttgtcagaagtagtgtctggtgtaaatgaaatcttaacttcacgtgggtcatggtcaccagcagggattcttaacattcctgtatttggaaccatgctttccagtggaacctcattaactgcgttaatagtcaactgtttagttacttctggatttgaaacagaggtaacagtgactttgtaagtaccagcttctgtaacttgagagattgtcaatcgaccttctccattgtctaccaaggtgaacttctcattgtctgcatcagagcgaacaatggtatatgacttatcagttgcacttgcaggagtcattttgattgctgtggttttaaattcatcagggaaaccaacagtgaaatccattctggcaggtgtcagagtcataccagtcacaggtactacaggagcttgtggttcagttgggaggttagagttaccatatcgaccattaagtttcagtgggtactgtgtatagtcaatgtagtagttatctgtaccatcccgaagatacaggtactgccagtcagccatcagtgtgataacacccatagaagaccaaagttcatacatagcctctggtgtaacatcaaggttgtggtctggaacatatgtgacttctggaacttcctttaaatcacaacgaggccaaggtaggaacatggagcgaggccaataccagcttggagtacccataacatcaaacttcttacctgctctaacttgagagcggaactcatgaaagaagtcaaagaagttatcaaattgtgcagctttaatcattacctaatccttattgaattttggtcacaagagagtttttcattttctcaagtgatttacgtttgtctagcttgatgccaaacttcatgcagtagtcaaacagttcatctttgtcttgaatagactctgcaatgctcatatcaaaatgctcaggtgtaggttcttcacttgtttcctcttgaggaatttcttcttcaatgacaggttcagaaaccggagcatctgaaagagtaggggtttcgaatgggtcaacgtaaggtaatggcacgtcagcacgtttaatgtggacgctatagtttccagtggacagataagctgtcatagggagaactgtgtcacctttcttaaccgattcgtgaatggagtagaagaaggaggtagaatctctagaaagaagtttcacagtgttttcaccaatatcatgaacttcacaatacattgaaacatctgtcaagtctgacaagtttaaaggtttcactgtgatagagtgttgacggttgtaaatagtgaatctataagattccttcacaaacatcttaccattatcaacctgttttagaaattcactaacaatctcttgagcactagttgctcgaattacaataccatcgttggtataagtaaaagttaccatcttacaatcctcttgattaaaactgattcaacatatttaaagtcgtgaaattcacttttagaaatcacaatctcttcatcgaaaggattattaagagttctatgataaaggtcactgagaatttcacctttcttgacaggtttccccatctgattgtacaggaagaataactcttccacgtcaaccgatttaattgttacatcacacatataagcacctattaagttgaatttagaaactgagaggaaatcttgacccgtatcaactcgctctatcgtgtgactgattaatcattgtggtggaaatctgtaacaattcatttaaacgatactatcaagattctttctcacgtctttttgtctataaataaatactactggtaaagacaccttttgtcaagatttgtaaagtctatttttagcctccaaccaaacaaacagtcagattgtgaacaaacagtttgtaaagttctaaaaagttcttgacaaacacttgacatacccttactcttatatttgtagagagttacttaaaagactctttcaagaatcttaatagggagtttataagtatttcttttaagattctatcttattcttaatgtatgtttattaggggttatatcttataggattcttaatagacttttaaaagaggtcacacaatgacaaacagaaccaagaaaggaacctttaaaaagggtcattctggtaacccacttggcagaccaaaaggtagccgtaacaagtcctccctcatcaaagcacaaatcagtcttgataacacttccgaaactgctgctaaactttttgaagctgtaatttcaagagaccctacaaaactctctgagtttggattggcagagggggatgtaaacctgaaagcaatgcttgaggctgcaaaaatcgttatgggtcatgctgctggtcaaatgaaagcccttgaagctaccgagaagaaagactctgagaaggataaaggtgcagaacttcctaaacgtccagtcttccaaaccgttgcttcaatctctaaagcttcctaacacgattttataagtaatctgagcaatcacccatctttgtagagaaatgtgctcagaatcgtttctaggacgttttagaaggggtttgaatgccaacacaaggtaaccaaacgtccaccttaaatatctttgaagaaactttacaaagggtattgacaagagtttggattttatgtagtatcagttatatgccttctccggcacaatgttgttgtacgctgataatgtttcaagattctgtacgtagtttccccctactgcgtacaggtctttttaaaggtttcttttaagaagtttttaaaaagatgttgacagagttaacttctcatgtaactattaatacttgttaagaaaatcggtgtttagctcagtttggtcagagtacgtcgtttgggacgatggggtcaaaggttcgaatcctttaacaccgaccaagaacactttttagggctgtgggcgaataggaaaggccaccatcctgtcacgatggagtatgcgggttcgatacccgtcagtcctgcaaagtgttcttaaaagaggtattagtcatgagatatttgaagtatgcttcttgggttcttttagctttaatcgaaccttttgtagcagccttagcagttattcttgccccgtttgtagttcccttctatagcgagaagaaaggtcatctgcctttcggattcagatggatggaaacatatgataacccgattgatggagatagaggccacgttgaacgttgggctaatatccgcaagattggtaaattgggtgtatacctacaaagggttggctggttatggagaaacaaagcttacaacttctcctaccacgttctaggcagaaacgttaacactgtcactaagtggaaaggtaacatccatgtaagttctaactctaaagataaccaaacaggttacctcttgatgtggaatgacaatgcgtggggtatttttgcttttgtaccttctattaagattttcggtaaacagttttattggagaatctacttaggttggaagctgaaaagtgttgtccctgaaaaggatgcattctcccgtaagcgtgtgatgcttgctttcttcattcatccacttagaaaataagattttatagcgagttggtagagtggtttattacaacggtcttgaaaaccgtcgaaggtggaaacatcttccgtgagttcgaatctcacactcgctgccataggtgagaagcttttaaggagtatggtactccgcgtggctccaaactacgtagcagagggttcgattcctttcttgcctgccaaatttaaagttgctggtgtagctcagttggtagagcagtggttttgtaatccaaaggtcatgggttcaagtcccttcaccagcaccaaagcatggttagaccgtagctggtagcggggcagactgtaaatctgctgttcatagaactcgggtggttcgactccatcaccatgcaccatttttaggacgttggcttatcggtttgagcacaagacttttaatcttgggagacaggttcgactcctgtacgtcctaccagacttacccgacagtaagaaacaacgcttccatgcatgtgattaaacttcacagtaagacttggaagctttttcttgacaaatctttaaagttctgtagtattaaatatgtagcaattaaacagatgctgtggtagctcagttggtagagcacacccctgataagggtgcggtcagtggttcaagtccactccatagtaccagtagcggggtagtgaagaggtttcacgcaagactcattatcttgaaactctggttcgaatccagaccccgcctccaatatttacaagaggtctttataattaaggaggttgagatgaaagtttgtctccatcctgattgtaataatcctataaagaattctcgtaaatattgttctctttcatgtgcagcaaaacactctaacattttacgaactcagaataaacgaacatgtcaattcaggggttgtacaaatctagtaaactcttatgagaattactgtgagaagtgtgctgcaataatagctaaagagcgcaaacagttgggtatcaagttccctccacttaaaaatactccaaggcagaagttaaaacttcaagctgtaaagtataaaggcggtaaatgtgaaatatgtggttatgacacctgtcagactgctttagagtttcatcacttagacccaaacgaaaaagactttgcaatatctaagaagtctacaacgtttgagaaaattaaacctgaacttgataaatgtattatggtatgttcaaattgccataaagagatacatgaatcccaacgaataaagatttaggtggagtaacacaacggttgatgtgcctgactgttaatcagagacaagtaggttcgactcctacctccaccgccaatttaatgctcttatcgactaatcggttaggtcaccagactttcactctggaaatatgggttcgagtccctttaagagtaccagttttacgttcattttctttcttcctttcccctctctattatttgcgtttcgtttctttctaggggttttccgacacaggttaaccccgctctttttaagctttatggggaaggttctcaattgctaaaatatgattgagttaggcagtccaactatagagttatcgtaagacctttacctgcgcaatgacgtcacttaggtatcttaggcagaaactgttacaaaccctttagcaaggtttggttgagaatcttccaccataaggtttaaagctctcttagctcagtaggacagagcagcggccttctaagccgtaggtcacaggttcgaatcctgtagggagtgccatactctaggagggtggtacggtaaccactcggttagggaggtgattccatatcttcttgacagcaaggctaaaactgtagggtgacccgtaacactgtgaagtagtgacgataacccgaatcattaggatagaagaaatgaaaattacccaaaagaataaagacctatttaagttacttaaacaaggtagtgccaaagtaaaccctaacgagaatgagtacaatctcacaaaacagattgtcacatcttctcaacagtctgttcaatccaaatatattggtctgactcagcctacaaaagatttgtttacacagcaaggtattacatcatcttttatgtcaaaagaggttgtagaggctttccagaagcttttagatgctattgagaaggtaaactctcactcatggttcatcatcaatgaattctctcagagggttgccatttgttactcataccataacaacctaaagtttcttgatgagacctacacaaaagaacatccaccattccctgaaacttttgaattcttatcagatgttggtggagagattctagagttgattgccaacttatctaggaagcttagagatacatgggattcactaccagaacttccgacacaggatgatgtggtaagggtttctaatgagacaaaagaatttaccgctcaaactgtagacctagctgttcatacggttacacagattgaccgtgatacaaaatggattcagacaatggttgattcaaataccaatgggtggattgccaaagttcttcctacttggaatacagaagatactctgactccaacaatagatattattttctctcagggtgttaaagatatcctgaatagacctgaataactgtcatggttatgtttccttacttgtgaatatttgtgttcatacaattaacgtcctcctttttgacccacattactgattagttggttttgtgggtcttttttatgcctatcttttaacaaatcccttgccaaatttaacaatccatagtaattttaaatagtcaaagcaactttgattctccttattaattgggctgtacaggctatttttgtacagtcctcttttctaattaactaaaaaggtaacatatcatggaaaataaagtatacaaagatttgtacgaagctcagtctactaacaaacagttggttgaaactctgaactttgttattggctctctggtagatgcttctggtgttgatattcagcaggaaggtagcttggaaaaattcattgaagaagttaccaaacgtattgttaagactgatgccgaagaagttgaaattgtagactaataatatacgaggatgcttaatggatttaaatgctattaagcagaaacgtgttcaagattttaaagcagtgagggaggggaaactaaaactctccccaactgttaaggctatctgtagaaagtacggtaaagaccctgacaaattcttccctcaacaagtcttgacacttctgcgttatacagatgaacaagtcgaactaatcatgcgtcttttaacagaccctgattttattgctccacaagctggttcacaagaaatcttcttaaacacatctgctgatattgttttatatggtggtgctgctggtagtggtaaaactaacgcactcttaatggatgctttaaagtttattgacgacccaaactttcgtgcagtttacttccgtaaaaacactacacagttagatggtggtttatggcctgatgctaagaaactgtttagtaggtttggtggtgtagcacgtgagcaagcccatgaaatcaatttcccaagtggtgcaactatcaagttcacttacatggaattggaaaaacacgctgaatcacatcaaggtatccagtattcagctatctattgggatgagtttacacactttagtcgaacacaggttctatacctcatgtcacgtctacgttctggtgcagaagctgactcatacatgaagtgctcaatgaaccctgaccgtgaccactttgttttcgattgggttgaaccataccttgataagaatggttatccagaccctaccaagtgtggtaaattacgttactttgttatggatggtggtgttttaagagggtactggtcagaagaagaatgtattcagaaccatcctctggatatgccaaaaacctacacattcattcagggtacaattgatgataaccctgtattagacttcatcgaaccaaaatatcgtgcaacattagaacagaactcccctatcaacgtagcccgtttaagatatggtaactggttagcacgtgcagaaggttcaaactacttccaaagagaatggtgcgagattgtagacgctccacctaaagatgctgtaagagttaggtcttatgaccttgctgcaactctaccatctgaaaagaaccctgaccctgactacacagcaggtgttagaatgtctaaatcaaaactagacggttgttactacgtagaacacgtagagaagttcagagaccgtccaagtggtgtagaaagtaggttgattgctttagccaaccaagattctagtaaaacacgtataactattcctcaagaccctggagcagcgggtaaatcctatgcatcttctcttatcagaaagcttgcagaaagaggataccatgcaagggctaaacctaccaataaagacaaagttacacgctttgcaccattctctgctgctgccgaggctggattggtgaaggttgtaagaggttcgtggaatgacgacttctttacagagttagaaggttttactggtgatggaagggggcatgacgaccaagttgacgccacaagtgatgcatttaccactctcaatgaagttaagttcttaaaaaccccttctatgggtgtcgtacctaaaatggtgagagataacccataccaaggactaagatactaggaaaaataaatgtctgagattacgtcacaaccatctatgccaccttttagacaaggtgaagttggtgctcttggtctacgtgttatttctggaagaattcttgaagaacctagaaggaatttgcaattccctgaaagtatcaagaccttccaagtaatgatgagagacccttctgtagctgcatcaatcaacgttattaagatgtttgtacaaacagttgattggcagtttaaagcaccaaagggtaaagagaatgaccctcttatcaaacaacgtgtagagttcttcaactcattaatgggtgatatggaagaatcttgggaagattttatctcatctattctgtctatgtgtatttatggattctcaattaatgagaaagtctataaagtacgtaacggaaggaaaggtaaatacaagtcaagatacaacgatggtttgattggttgggctaaactccctacccgttctcaaacaacagttgataagtggtactttgatgaagattgtagaaatattatcggattcaaacaaaaccttaaagctgtgaattatctagcagatgctgatgtaactaaactagaacgtacaattccacgctctaaatttatgctgttcaaatatgatgattcttgtggtaatccagaaggacgctcccctttgattaacgcttatgtcccttggcgttataaagttcaattggaagagttcgaagcaatgggtgtatcaagagacttagtaggtatgcctaagattggtcttccacctgattatcttgcagaagatgcagatgaagataagaagatgttcttagaatactgtaagacaatcattaatgaccagattgcaaataaccgtgctggattaattgtcccacgttttattgaccctgaaactaaagaagatatctttgagttctccttagtatcacgtcaaggtgctaaagcttacgatactgctgaaattattgaacgttattctaagcagattatgatggcatttatgtctgatatcctttcaatgggtcagtctaaatatggttctcattctctggcagataataaaacaagtatcttagcaatgtcttgtgcaattatcttacgtcatatccgttctgtgattaaccgtgatttagtagcccaaacttatgcactgaatatgtgggatgatgaagaccatgtagaaattgacttctctgatattgaaacacctgacttagaagttgttagtaagtttgttcagcagacagttgctgtaggtgctattgaagtagataagccaatgtctaattacttacgttctctgcttggtttagaacctgctgatgaatctcaaaagatttcagaagatttgagtccacaaacccaatcaaaagctggtgaaggttataaaactgctggcgaaggtactgcaaagtcacctagcgctgttaatacttctgcggcaaataaggctaataagtaatggcgaatattctctctatttcagaaagagttgtcgtatctgattttagaggtattcagacggtaaatgaaacactctctgtaaagaacctatctcaagtggtttattcagggagtgttgaccctgcctctgtagaacctataactctctgtagagattttaaagtcagattagacggaaaagagtttattaagggtagttttagagaaattgttaaaattccatttgacagttcgtgtaaagtgggtgtacagttatatagttgtaacagaaaagtgctgaatgtttcagagattgctcttgctttctttgaagttgatggtgcttttaaggttaacatgactattgacccccacgataacaaactttattacgttatttcacaagaagactacaaaacacttgtcaaaaataaagtttatgatacatttgtaactgtggtggataaaagtaacaattcctctattgtattcactcgaaaagtgaggttcaattaatgtctggtacattatcagtagagggaaagaacaaaattcttgcttctctgctaccaacaaaaatttctttacacaatgacgtaatgccaattgtaggagatattaaaactgaaaaggttgatatccatttcggtgctcctgacaatggtcttatcgcgtcactaggcaatgtaattatcaacgttaaggctggaacaactgtaacccattatgcgttatgggatgccgaagatgttatggttgcatatggtgaattaacctcttcacaattctttgcacaagatggtgtctacgtcattgatgcaatgtcaattgatttaaataaaggtgtagcttaatgacaggtaatctatttagacttgctagtagagtctttaataagcctctcttagcaacagaagaccttgctcattcagtttccacatacctcagtaatcgcttatataactttgataatctaaatactgaacagcttgcagttaatcttaataaggttaaaggtgaagcagcagattatttaaaagttactgccgatggtgttgcaatcatccctattatgggtgccttagctcatcgtatgagtggcattgatgcaatgtgtactggtggactgaattcatacgaaggtattcgtcgtgcttttgatgaagcaatggcagatgattcagttaaatcaattctgttaaatgttgattcaggtggtggtgaagcttctggttgttttgaattagcacgtcatattgcctctaaacgtggtgataaacgtattgtagctttcgttgatgagtctgcttgctctgctgcgtatgctcttgcttgtgctgctgatgagattgtggcaactcctgaatcaatgacgggttcaattggtgttgtaatggttcatcaagaagtctctaaagctatggaaaaggctggtgttacagctaccgtatttagagcaggtgctaataaagcacttggcactccttatgaagctctcaacgatgaagctaaacagaagtttgaaaagcgtcttgcagaattacatgatggttttgtaaatcacgttgctaagatgagaggaatctcacctgatacagtacgtgctacagaagctggtgtattcaatgctcaagaagccttggacttaggtcttattgacaaagttatgtcaacagatgaactagaacgttatgttggaagttctcttgaaagttcttctgttagctccgaattaactgtaactccaactaacacaggtactgaaatgagtgaacaagagttgaaagaactccaagaactgcgcgaacaagtagcccaatttaaggctcaggaagaacagaaacatgttgcttcactggctgaaactttggctgatagtgcagtaacatttggatttgatgccaatgctattgctggtgcaatgctggctcacggtaaggaagctcctttgagtgtagctttcatgaacctgttaacctcagctaatgaaaaactggcagaaatgtcagagaaacatcaagctgaattggcagaacaaacacgtgctattgaggctgctagagaagcagttattacctcagaagcaatgaaagaattgggtgccgaaggtgaagctgctgccgaggaacctaatactgacttgtctccaaaagcacaagttaacaacaacgaattactgttagctgaactgaaaaagttagctctacagaacgcttaattttaaaattctaagaggaattaaataatggcttttaaaggtttcattgatggttacactcgtcctgctctgcaagatatcgtactgtacgaagtatctagcccaaatggttggtctcgtaaagtaatcgctgctcctaaagcttcttatgaagttggtgatgtagttgacgaagcaggtactattattgtcgctggtcaagaagcaaaagcttttggtgtagttatcactcgttgggataataacgaaggtctgactactcagggtggtatgctttccccaactatcatcttccgtgatgcagagattaaatacagtggcgttaagactgccgaaggtgttaatcgtgcaaacgtcctgaaagctctggctgctcgcggtattgataccattcttgataaagaagttgcttaatttaaaactaaaaagtgtattttggagaatttataaatgactactatcgctaacccaactgataacatgttcctgtctgacctgactggtgttgtggaaaacattcctaacacttatggcctgattaccaacatgaatctgttcaatgcgaaccctatttcacagacctctttcattcttgacctgcgcgagtttgatatccgtctgcaagactctgtagaccgtgactctcacgatgctactaccattgattcagatgttgtaaaacagattggtatggttatgccttacttcaagtctgtagaatctctgactccaatggaactgcaaggtgttcgtcaagttggtactgcaaaccaacctgaacaggaagctgctgttaaagctcgtaagctgatgaagctgcgtatgcaacatgctatcaccaaagagttcttgatggctcaggctctgaaaggtaaaatcctgaacccacaaggccagttgattgctgacctgaatgctgctttcggtgttaccaagaaaaccttctactttgatttggataaccctgctgctgatatcgacggtactatcgaagctctgaaagagcatatggaaaaagaagctctgactggtgctctgattgacggtgaacgtatcaaggttctggttgacagtgtattcttccgtaaactgattaaccatccaaaaattcgtgaagcgtatctggcacagcagtctgctactgcttatcgttacatgactggttctctgcgtactggtgtaagtgatggtactgctgctcgtacttctgagttcgtatatggtggcctgacctttgttaagtacactggtgctttcaaagatatgcgtggtcagaaccacaaactggttggtatctctggtgttgctgataccgttggtgttggtcatgcattccctgacacctctatgctgggtgctgctgctgacctgtaccagattgcatatggcccatgtccaaagatgggttatgccaacactcttggtaaagaactgtatgctttcgaatacctgcgtccacgtgatgaaggtgtagactttgaaatgcattcttacatgctgccatactgcactcgtccacagttgctggttgacgttcgtgctgacaaacagtaattaatcttgaaagaggattattcagatgtatacaaatgaccctgctaataatcctcttgatagagtcagaattctatgcaccgacacagataacgatgaattactcattgaacagtcggtgctagagttcttttacgaatcttctaacagaaatgaaaaattagctgctagacgtgcattagaatacctcctattccaagttgccaaaatgggtgatgagaaagtagggggtgtttatttacgtaatagtggacgatacaagaacttgaaagatgcttataacatcctcttgaaaggttcttggatgggaggtaaaccatatgcaggtggtatctctgtatctgacattgaaatgagaagacgtaatccagactctattaagaaagcaactgaacaaggtgattgctttgattactacacaagagaccgttataataatgacgaccctgattcagtaatcgtaattcaaccaagttgtgacagagattaatataatggttaagcgcgtagcaaatcctgctagagcaagactattaggtactgtgaagaatcttaaaaagaataaggctcaagttgggtattttcgtgaacagggtcttcacagttccggtttcacatatcctgctctaatgtatcttcatgaagtaatcggtatttctacaaagtctggtaaggtttatagaagggcttttgaaatgacttctatgttcatgaggaaaacccttcaagataatgtcaataaagatttaaccagattgtttaagtctggaaatattgaccctaccaacgttttagaaaactttgcaacttctctttccaacggtattaaatcaacctttggtaacccaagcattctacctagtaatagcccattcactattaaacagaaaggtgctaacaccccattggtagaaactggtgagttaagagacaatctagcttacaaggttaccactaagaaagggattaataaaacatgagacttttaagacgacatactttaacagttcgaagaagacttgatgaaggttattacaacgacgaaggccgttgggtttcatctgatgattatgcagaagaaactattaaaggtaacctgcaaccttatgtaaaaggtaacatcaaaaatgatatgcagttagtcttaccaaatggtgtaagaacaactgacacaatgattctgtatacgactgctgaattagttatctgcaatgaccgtaactggacagaagccgatttagtcatggttaaaggtactgagtacgaggtttatagtgtaatggattggactgaacaattagcccacacatcacattatgaatatctacttattagaagagataaaatgaatgaacttagaaacaacagagattgaaaatggtcttgttaggacgctcattcaagttatcggaaacagattagccaaagacaaaaggggaagaccaaatgttattgttgcttttcctactgataagagaaatgagaaaggtctcaaaccagaccaaccatttattaccgtaggtgttgtcaatacaacaactccttatggttgggttctagaccgtttcgttgatgaagataatgttctttgttacaggattgcctttcaagtaaccgttcaagttgttgtttatggaaaacttgcacataatatcttgacggaattgaaacaacgtttagaatttaatagtacaagagaaattattcagagtgagacaggtgctgttctagttaacactggtgagttaccaaataactttgattatctttcttctgattttgaaaactctgccccgttatttttaacattgaatgtaaactccatccttaaagaccctaatggtgaaatcattgaaagggttattgctgatggtgaattcacgtataaatatggcgataaagcagaatatacaattcatctagatgaggttagtaaataatggcatggcaagaaattgttgatgtagcaattacattgaatactgctggctccactcgcgaaggttttggtcttccaatcttcatcacttcaacagaccgtttcgaagaacgtgttcgtggctatacttctcttgcagatgtagctaccgatttgggtgaaatgagtcctgcttatatggctgctaaagcactgtggtctcagacccctaaagtgactcagctttatattgcacgtagagatatgcagtatatcgtatctattccagatgctgttcagggtcaaactgaatatgctctgactatttacactaatggtggtgtttcaaataacattacctataccactcaggaaagtggtgatgatgccaagatggtgtttgataagttgaaagaagctgtagaggctattgaagcaatcaagaataaagtaaaagtaacagtctctggtgctggtagctctgcctccatgctaattcaggcagaaaaccctgatgtagactttgttcgtgtagttgatgctgctgattctggtaagttccttatctctgcaactgcatctgacactgctgaaagcattctatcttctattgatgcatacaccactgattactactttgtagcagttgacgaacgtgaaaaaacttttgtcactcaaatgtcagaagctgtagaagctcgtaagaaaatcttcttcacttgcaccaacgattctaagtctctaattggtgaagatattacttctgctgatgatttagctgctttgctggctaataagaaaatgtctcgtaccgtagtcctgtggcaccacaatgcctcaatcgactatccagaaatggctttcatcgcttatggtgctccatatgatgcaggttctattgcttggggtaacgctctgttaactggtgttgagttctcacgtcagactattggtggacgtcctctgacaagctctcagaaagctgctttggaagcacgtaactgcaactacatcgacttagatggtgggttgagtgtagtacgtcatggtaaggtatcttctggtgaatggattgatatcatccgtggtattgactggcaggaaagtgatttgaaaacttcactgcgtgacttgctggttaatcagaagggtggtaagattacttatgacgatattggaatcacacgtgttcgtcaagtaattgaaacatccctgcaaagaggtgttaaccgcaacttcctgactagctttaaagttagtgtacctaaatctgctgatgtatctatccaagacaaacgttctcgtatcttaaaagacgttcgttttgaagcggtcttagcaggtgctattttggatgttgtactgcgcggtacagttgcttacgaataattaaaaaaggtgatttgaatgtcaatgtttcaacagtattcccctaaagatgtagtttgtagctggaacgggattgctattacaggctttgctcctgactctttcctgcgtctgcaaagaaactctgatttggttacaccagttgttggtgcaggtggtgacgtagctctgacccgtaacgctgataagactggtactatcgaaatcgaactgatgcagacagcagagtcaaaccagtacctgaatgctctgtatgcaaaacaggaaaacatggagttggaattggatattgcatctaacttcatcatctatgacccatctggttctgtaatggcaactggcgttaacgcatggttacaagctctgcctgatgtagaattaggtgcagaccagaactccaaagtttggacgtttggctgtgagaaactagaaatctctacaaccattcctgcttctggcgtttaattgattaattccaaagggggaagtctctgaaaaggggctttcctcttttttgtttatataagagagaacatatataatgagtacattaccagcagttaaaagtaaagaaattaatggcaaaacttacaacatcgtactattagggacacgtgaaggtttgggtgtttctatgaagattggtaaagcaattctcccagcagtagttgatgtagttggtgctatccgtggacaggatgaactaaactttacagaagctgtaaaccacttgtttactcagcttactgataaggaaatgaatgacattctggataaacttttcaaaggttctactgtagataacttccctatcaattgggatgtatatttccgtggtaactatggtgaattggtagacgttgtagcattcgcattagaagcgaacttctcaagttttttcgaagcaagcattttcaaaaacctgttttcgacttctcaaaagtaacagacgctggcaagtgtccaattactgatgatgccgtaaaaagaacgtatgaaggtgaccctctaatgggggtcattctttcagtatacagtgatgagaattgcaaagaaactttgtcagaactcctaaacatgcccttcacagattttatccaactaagggaattcctagaagtgcaagcttcatacagagaagaatcccaattcaatcaacttagacaggccaagaagagataaactaaatgagtgattataaagttgatgattttctaattgaacttggattcagtgacaaagttacagaaggtttgttaaaacttgaaaaaggtactatggctgctgctcagagaattgaaaaagctctgaataaagctttcaacgtagatgcttcaaaggttttaaaaccttctctgacaagaatgttgaaagatactaattcagtatctggaaagattcaaaaatcactgaatgatgcgtttaaaattgaaagtgctacaaaagcttctatgaagagtctggaacgtcatgttaaccagacttctaaaaagcttaatagaacgcttaaacaggctctaagcgctaatggtactgtagacgtcaaggtcagaggtagaagacctcctacgagcgatacaggaggttctagaggtggttcaggtaatggtgggcgtggaagtagagcagatgttctacaaagacaaatggatagaatgtataacaaccaattctattcaggtatgacacgtagacttgaaatgatggcttcacaacaagccactggtaaagttaaataccgtgctgacccaagtttaaaacttcaagagtttcgagcaagtctagaaagcctcagagaaagatataaaggtacaggtaaagtttcagaataccaaatggaactgaaacgaatgattgacgtcaataagaaatggattatgacggaaaatgcccgtatcagacagatgcaaaaagaagcatggatgagcgaacgtcttaatgcatccactaaacagttgattggttcattcgtatctttatacactgctgtagaagttgctaaacaagcaattgatgcaggtgttaaaagacagactgcacagttagcttcacaagctgtatttggtaaagagaatgttgtgcaagcccgtttatttgcctctaccttctctcaacagattggtcaaggttacacggatacactgaaacaatacactggctttgctgctggtgctaatccagttctaggttttgaaggtactcaagagttctataagaatgctgctatgttctcccgtatcaggggtgcttctgacgaagacttgaaagggattatgacagctttccaacagatggcttctaagggtaagattcaggcagaagaattgcgtggtcagttaggcgaccgattagctggtgcggttcagttgtttggtgatgctcttggtaaaacaccagaagaacttgataaactcatgaaggacggtaagcttcttgctaaagacgttcttcctaaagtttctgaaaagatgcgtgagttggttcaagctgctggcggtatggatgcagtatccaagcaaacagctacttctatgggtaagctgaaaggtgaatgggaaaatactctggtatccatgtttaatggttcctcagaaggtatttctaacatttcaacctcattagctggcttcttagaaagtgcaatgggtgttacagatgcttttggttggtctattggacagttattgtcaagcatggctgatggtgttgacattgcatctgattggacagctaaaatctctgccctgattcattacactcaagcttggtacatggggttatcagatagtcagaagaaacttattgatggttctgtagatattgcttctaaggtagctcttatcactgctggtgtaggtgctttgagtggtgctgtaagaatcttctcaggtcttattgctaagattctaagccttgttggtatgaagggtgcagcagatgcattgacaggggctggtgcaggtgcagcagagacagcagcaagtgggagtaagggtattcttggcagactacttggtaagaagttagggttaattggtgttggtgtaacagcttatgaccaagcctctgactacgtacaaggtcacaaagagttctctaactacacaggctcttattgggatgcattgttagaaaaccgattcaaacaagctggtcagaagattgatgatgtagttaacccgaaagaccctgtactaaatgctcctattgtttcaggtgctattgataatatgcagaattgggcttcttctttacagccacctacaatgatgcctaattacatgcaacctaacatccctacatcatttgccccattacagcagatgagaaaacaggaaatctctgttaagttacctgaccaaactcttaacgttcaagtggaaatggacggacaagtatttgctcagaaggttattcagattaataaccaacagagtgaagctgatatgcatagcactaacattatgactgatgattaaggggtttaaatggctgttcaagtcctacctgtaagatataccggaaatgactctatttatttccatttgagagataacatcaatgaatttctctcattaactgcaacaacagacttaaactatgatgccccaatgcaggtaactactcagcctatgcaatccggtcagactattacggataactatcaaagagcaccaaggacggtctctctgacaggggttgtggttgttggttattcaggtatctttttaaggtctttacagactcgtactgtagaaaactttattacaacttgccaactatggagagaccagaaacaaatcttatcagttgtttgtccagatggtttaggactctcagattgtgtgattacagaattcaaagcctctaaagatgttggtatcaagaatggtattagggttaatctaacattccaagaaattaactttagaccaattgtaggtagaactacggtaacaactgaacagaaatcttctggtggtaacgctacaactaaagatggtgccactacaagtaaaactgttaagggttctgtagccactgacattggtactggtaagattggttgtcaagggttgattgatgcgagacaagcaggtgttattagctttgatgcttcaatgactaaagctgtagcagattgtgaatggtctcaaaagacaactaagggtgtcaaagctttctcaccttctgcaagtaaacaagccgaagaccttatgaagaaacacggtttaaatcctaacaagagggttccataatgactttaaagattcctgtaccagatgctgattggtcacaacaaactgtgacactagatggtgcaatcttcttagtagatatgaagtggaaagagcgtactcaaaggtggtacttgacactaactgacactgatggtaatgtgttacttactgaaaagaagtgtgtaacagatatgtcacttactggtaggttctctattcctgaactagcaggagaaatctttgtagagaaaatctatggtaactccgaatatccaaccagagataattttggtaatggcaaagagtttgaactcgtctattacacagaagaagaaatgaaatggtttatggagattcactaaatggcaacagttgcaaccactagggacgcagcttcttcatttagatgttatcagttagcagtgggtacagaggcacaagccttccaagataagtctactcagcacactaaaaagactgaggatttgattttctttgacaatcttgagttcactgctaacgtttcttacacatctgataagaatagaagctctaccgacgatacaacattcgagatttataatctcaatcctgaaatgaaatcctatttcaagaccattggggcaacagttctacttagggctggttatgaagataatttcccaagggatgaaaatggatacgtcaagcctaattatgaagaactccctgtaatttaccttggaaccgttgagtacgcttacacttacaaacgtggtgtagatatgattactcgcgtaatctgttcaaatgataagtttgaaagagcagttactaagagttctgttacataccctgctggtactaaaagagaagccattattcgtgacctgattaaacagttagggttctcagtcttagaagcggatatgaaaagtgtttcagcatacacttatgtaaatggctttacagtctatgggagtacagcagaagcactgacaagagtttgtgaagagaacggtttacgttggtttacattcaataaacagattcgtattgtccaaactgaaacttctgcaaaaactaatgcatggattatctatccagagaacgtaattgattctatccaagggtattacaaaagaactaaaaagaaagttccaaagaaagcccccaaaaaacctaaaccacttccttctgatgttgtggaagtaaaagagggtaatgcaatctaccgtatcaaatctggtgtacgttgtaaaattcatttagatggtagaattagattaggggacaacatcgctatcaaaggtacagaagactttgatggacagtatagggtaagagcattaaaccactcactcaactttatgtctggtgaatggacaacctctttagatttagataaggtgtctcaataatgtctaatatcaggaattcaacagttctgactaattatcttgatgattttaagaaggaactctacacaagtattcctgcaaagattgtggcatataatcctgaaacccaacagtgttctgctcaaccattactttacgttgatgatttagaaatgcctaccatcactggtattccggttattttcccttccggtggtggtggggttttaacatttcctgtaaagacaggtgataaatgttggttatcattctctatgctacctcttgaacagttagctacaggggacagtaaccaagcagtctctgttaatggtaaacgttcacatgatatttcagattgtgttgcttttgtaggattcagttcagctaaacagaatttcaaaccagaccctgataatgttcaactcaagtttgggtctttatcatttaccttccaagaagacggtaaagctattttagatggttctctccatgttactaaagagattaccactgacaagactgtttatgcaaaagaaggaatttatggtgaaaacttctataaccatgatggtttagactttaacagtcaccaacaccattattactggactagcagtagtggtgaagatgagactcaacctcctgcataaaggtattttaaatggctacagattttgcattaaatcttggtgctggttatacagtccagttaggccaagaaaagattttcgttgaccacggagattttaaattaagacctgatggtcaaatcaaattaattccagatgatgatttagctactcaagttgctcaaagattacatattcgatgctatttaagaaaaggggaagtgttctttaatacacaggccggattcccttacgcacaacttggtaagtttaaaacacatacaagtatttttgataactacatgaaacattatattctagatacccaaggggtagatggcctctacaactatgattcagttctagataatgccactagaaagattacattggactttgatgtaacaactaattcaactggtcaaccaattaaacaatcagtagaggtaaaattataatggcaggtatgacagcaactggtttggttactgatagatatcaacagatttttgatagaatcaaagaccaactctttacagaactctctccaaacttagatttgtcagagaactcagatatgggtatcttcctagcaactgtagcgagaagtttggcagatgttcatgaagtaatttcagaagtgtatgatgcacagattattgacaaagccgaaggatacgcacttgacgaactaacagcgctgaatgctatctaccgttatgtagaccaacctacaactggatacgctgaattcacaggtgatgttggtgctagtgtccctagtacaactcgtttaagaacaacttctggatttatcttctacccaagcgactcttttgttattcgtccaagccgttgtattgagactcaggttagagtcaacaacattaaagcagatgaagattatgtgattatcattgataatatctcatatacatatcgtccagattctgtagtaactgctgaaaagattattacagaattagctaaagctattaatggtggtattgttgctaaagcccaagtcctacatgacgacgacaaggacaaaacaccttacctgagaatctataaagatgaaggtgataaagtagaacgtacaaagtatatgattatcactgcaacatcttatatgacgtttggtaaaactacttgttattaccctgtggtttcagaagataaaggtgctatcattggtcttgctggtactctgattgagattgacactcaagttacaggtcttgatagtgtttataaccgttatgacttaacaactggtagagataaagaaactgacacagagttacgtgaaagatatctatccagtttgattgttactggtgtttctacactagatgctattgtatcaaacgtagagcgtgtatctggtgtatctgatgtaattgggacagagaatgacaccgaagttcctgtagatggtatccctgctaaatctttcaagattactgtagtaggtggtgacgtaaacgagattgctcaggctatttgggaaagtaaacctgctggtatcagagcatttggtacaacttctggtgaggccattgatagccgtggtggtactcatactttattctttgctagaccaattcctcgctatgcatttgtcaaattgtcttatacaatttatgatgaagaagcattaagtgttgagaaaaaggacttacaagatgtaattaagttggcaatcaacgaatacggacgtacacttaaagttggtggtgatattatccctaacagaatctatggatatgtctataaagctgttcaaggtatcgtggttaatgaaattaaagtagccacttccccaaaccaacagacaaaaccagatgaaggtgaatataccactgaacgtatctcaatcgctgctgaccagtatactgtttgggaatctaaccagtatgatttaacagaggaacctcagtaatgccttatacgcctattgaagattatttcactaaggctattgatgagaggacacctacacagttcaaagaaaagttcatctacaccactttcttaaaagctcttatgaaagaggtacaaatcacagaagaacttgcatgggatgtttacaataatcgtaatatccacactgctgtaggtgttcaattagataaccttggtaaattactagccactgtaagacctgtagggatgcctgacgaccaatatagaacattactttttacacgtgttatgttgcgtcgttcttctggtactcctgaatcactaatgtcttctatggcaagtatttataactctgaatacacacaaatctatgaacatatcactgagaagtacatgacaggtggtattgttatgagagtacgtactcagaatgaagtaacagatgctaccttaactcttaataaaatctctcctacaactactggatgtgtggttattctcagagatagaacccctgatggtatggcatggactccacaagaggttaccagtgagaaagaaggtcttgttgatgaaaaaggtaaccagtttgtaacagatactaaccgagctattgtaacagccactgatgcaggtggtagacttaaaatgtatggtgcaggttgtttagcagatgctggtttaagaagaggtctgttaaaagttaataaagaacctgacgatgaaggtttattactggttactaaaggcttacaagaaggtgctttagcagttgagaaagaatctattcttggtggtagatttggttatatgtgtgaagtctctcagttagtcagaggcaaaaccgatagaaaagatgttgaaggagaatcttaaaaatgagtaaaaagaatatgcgacagttaggttctgtcaatgacaatcatgaagttttaaaaaatttacttttccaatgggctgtagatgagtttgaccctgacagtaaccctacaaagattgttccaccagacgaagttcaacagacgggtcttttaaaagatgaaccaatgggtagacagtggtttaactacatgatgaatgctttgtcacgtgttgtataccatctttaccaagaaacacatattgatgagacaacccctgcaactcatgagattagactttcagctattgagagacccgattgggttcaagttggatttgttctatttagaactgatgaaaaccaattagatagttctggtaagatttattggtacgaacaccaagcacctcagattggtcaagaataagtttacaaggggtctttattgacccctcttaataggagtttttaatggcaatcggtgaaattcaaattaacgccttaccggaggcttccctccctttgcgtttaactgatatcatgcatttgaaagagggtgttgaagatagacgtgcaacacttggtgatgtactttacccacacacttctaggactgataaccctcacgcagtaactaaaggacaaattggtttgagtaatgttgtgaatgaattacaacttatcaaatcaaataacttatcagatgttccagataaagcagttgctagacagaatctagaaatcctttcagcagatgaagttaaccaagcagttgctgaacatgctgatagaactgataacccacataacgttactaagacacaagttggtttaggtaacgtattaaacgtttctcagttagaacgtgctcagaacttagcagatgtacctaataaggcaactgcaagacagaacttaggagttctttcatccggtgaagtacaacaggcaattgggaatcacgtcaatgataaaggtaaccctcatggagttactaagacacaagttggtttaggtaacgttcagaactggacagagacacacacctatactgagaataacactggtaagtatgttgcagcagatgcactttacaaactttacaaagcaatccaagaccaatacccaattggcagtacagtaatctcttataactctgctaacccatccacataccttctgtgtggtggtacatgggtacttgcttctaaaggtagatgtttggtagggtatgatgatagaaatgctggaagggctgtaggctcacaatttggtgcagcaactgttacactcaatgtaaataacttgccttcacacactcacgcagtaactttgacaggtggtgctcacaaccatactgcctctgcttctgcaactaatgctggtaaccatgctcactctacgtacattggttctcatagtcattctttcagtggtactacaagtacgtttgattatggcactaagaacaccaacacaactggtgctcactctcataccattgaacttgacagaggtgacagaggttttggtagacctgaacagggtggcgaaggtttagaaagacgtgccaatacaagtacagaaggtaaccactatcattctgtggcaattggtgctcataaccatacagtgagtggtaatacttctgcatttgattatggttcaaaaacctctaacacaactggtgaccatactcacgcaatcacagtttcagttgcaaccaataacagtcatactcatagtggtaacactaatgctacaggtgggggtgcagctttctcagtagagcaaccttccgaagtagtttatatctggcgtagaacagcctaattgacaggggtctttctagagcaatctagggagaccctttttcatttatatgacattccctttacaaaacttgacaaacaggtttataattgaactctgatgagaaaatttactcaaacttatttatagaggattaagtttaatggctgatgatgtattgaattactataacatcgaacaattaaatagatttgatggggacttaatctctcaagactacttattagttcgtgtttcaaagcgtactaacatggtttctccacaagatatgaaagtatctattggggattttttacgtggtacaggtttagatacgaaagttgacaaacatggtgacgtgatggttggtgagttgttacttgctaaccgtgtatttttaggtggattgctcactactggtgaagaaaagaagattgcacagattgacgataagaacgttctgtggattggtgatgaagctttgcctttacgagtacgtgctgcacagaatcccacagtaactatcaacaacaagcaagaaactttctatcacactggttttaaaccatctgctacagatgttggtgcatggtctaaactggaagctgaccagcgtttcttaatgaaatcagttggatggaaacagaatgcacctcttactactcgtactgccgatatcattgaagaccctagtatgtgggatgctggtttttcaggttactacagaactaatgatacccttggattcaaagggctaactcttcatgtaacgcaccctaagtttaccaatggtgctcatgcacgtggttttacttttgaatatggtggtacagggactggtacaaaagtctatgtatatggctatgataaagatggtgtaaaacagtctaactacaaagtctatacagaagctgacaaaccaactcctacagagattggtgcatacactcaaaaagaagttcaagatttactgttacaaacttctcagtgggctaccagtacctttgtagatgttgctggcgacactatgactggtgtactaaaacttaatagtgatgatgagaatagactggtactgaaaaacaaagatgatttgatgggtaacttcattcactttgtagattcaactggaaaatccattgctcagattggtaaagatgctggtgatgatttcttaacaattatcaacactaaagacaatacttcacttacattagcaactgatagaatcacttctgataagaatctctttgtaaatgattttaaagtctatcatgaaggttttaaacctacctttgcagatgctggtgcagtttcagcttcacgtaacttaggtacaactgacttagacaccattcgtggtaaccaatttgaaggtaactggcatcaaagaaacgatacagatgctactacaggtagacactatccagttgctttaggtggtactttaactgtttacatgaatggtatcaatggttgtgttcaggtatatcgcgctaagtctggtaacaaagtttatcagagaacctatgatgctgctgtaggtcagtgggctgcttgggtaaaagtctttaacggtgaatttgtaccaaatggtgcagatattccatatattgcttcacagaatgtctttgtatctaaaggctttaaaccagatgcagactttacctcattcaatgatgcaccaagaaactctactttctttggttatcaagatgctgataatgctcctgtaggaatcactggtacatttgttgacttcaactcttctggttaccattggcagatgggtactgattacagaggtggtggtaagtttggtttcagaacctttaatgcagatactagcacttggagtgattggggttacttattctctactaagtatcttccaactgctgaccaagtaacaggtttagggactgctgctaagttgaatgcacagacttcctcaacagattctgatacaaacaaacttatgaaggttggtgcttttggtcttggtactagaggtacacagttaactgctaattcagactttggtagagattatcttggtaagtataacgttggttcaggtttcttcttctcagggaatgacattacaggtgctgtaactactactggttggaaagacttcattctgttaagacacaatgaccctaaagaccctgctgcaacatgggctactgctttggaaatgtctcaaactggtttaggttaccatgtttgggagaacggtactcataagaaagttaaagtctactcagaacttaacaaacctactgctgctgacgttggtgcaatctcagaagatgttatttggggtaaagttgactctttacagaaacgttggacagttggtgagaactccgcaggtggttggtggaaaatctgtgaagttgcagttggtcagaatggtttgtctgctgaatttgactttgtaggtggcagaggttttaatggtgagttccaacagcaaggtaattttagaatggttctcagaacttctaacaacacacctgctaatgtgaacgaagttggtagagcagaactgtcagtttacttggaaggttctattttcccatttggggcaatgggtttggaagaagttagggcaaacgtctatgcaatttggtggcagccaactagctacgcttacggtacattcacctttaaaccaaacttaggttacaaaacttcacaagagttggtatggttccctaacactggttctgcaaataaacctacaacttgtgttcaagcggtctctattagaagggttctgacaagtaacagtgatagaggactctttggcgatacttctggtggtactggaaaacgtaactggtacaaaatcactatggctggtgaaactgaccacggtttctatggtgatactaactacttccagtttattgcacaaggccaaaatgttctaagtttagctaatggtagaattcactctaaacgtgatttatccattgatttagctggtgaggcagtagcccaattaagattgagaccaaacaatacagctaacccttcattcttagttagaaatgatggtacaaacacctactttatgctaactaacccgaacgatgcagatggcagatacaatagtctgagacctctctacattaacaatgctaatggtagtttgagctttggtgagaacgtatatctgagcaaaaacttcacaatggatggtgttgcctctgtaggtgctcagattacatggaaccctaaagggagtggggtagtacctcaaacaagagcaactaatatcagactttggggtacatctgctagacaatcagtctttgaatgttctgacacaaaaggttggcattggtactcacaaagggttaacgctgatgatgcatctgtacagtttgctatcaacggttctctgaacactactaacattacatgtagtacactctcatcatcaaatgacctatggttgcgtaaaggtggtactagtcatatccacttccaagattctgctggtgcagtaaaagcaagagttgcaggtcaggatacaggtagagtaactattgagcacgttggtgttgcatcttggtacttccataacaagatgattcagttagacactggtggtacagtaactggtgaagctatgggtctgattcgaggtcaggtacagggtggctcttgggcttcatggaggacacgtgctgctggtttgttagttgactgtcaagactctgtaaactctgcacacactatctggaaagcaactcattggggtaaatatcaccttgctgcgcttcatgttcacggtacggctgatattaatgctgttaacgttaaaatgaatgtgcataatgctgaattcaactttaacgcaagtggtgactttactgctggtagaaatggtaacttcaatgacgtttacattcgttctgacagaagactgaaaaaagaccttgttaagattgatagtgctcttgataaagtctgcaaactctctggttacacatacgacaaattagcctctctagggtctgataagattgttggaagagaagcaggtatcattgctcaaactttacaagaagtcttgccagaagccgttacagaaagcaaggacacagaagacaacactatcttagtagtttctggttctgctgttaacgctctcttggtagaagctatcaaagaactgaaagaacgtgttgatgcactttctaaataattaactctggacagggaagtccatctttataggagaatttaa

SEQ ID NO: 7 - DNA, 48503 bp, bacteriophage
cttaaccggcaagagctttgagccttgccagagcattagaagttggcgcaaaggccatgatcaaggagtcggccatgttaggcgacgggatgccgcgctttttcatgtcctttttgctttcaactttcactctgccgttattgtcgtaatcaacacgtggacgcgaaagttctgccttgaggtattcgaggtttttgatatcggatgaaaggcttattagtttgtcatcagggaaggattcaccatgctctatcgctctccatgtattgtagaagcgctgtctaaccatccaccaagcttgtgcctttaggttggagaacatgtctttgtttgttttacctggcatgtattcgctatcaggctcaaatacagcggcggcggcattgaatccctccacctgacttctggcaatgcgattgagttgcgccttaacaccggcgccaacgccgattgagtcataaataaccttgtctgcactgatgctgtctgcatactggtttactcggttggcagactcgattacatcgccacgactccactcctgcacatccttaacaactgatccgtgtgccattgtgatggcgttgctatcttccccttcatctgcaacgtcaaatccgattctcttggcaccagacgcagtgaatttgagttttatatgggaatctactgctgcggcaatccatgaaggtttgatgatagcaaggtcgctatccgctactggctgcccctcccaaatgtgctgataaagatcgaagtctttacgcttgcactcctccatctctaggcgcaatacatcaggaaagtgagggttatcattccagttaaccgttagtaggcaaatgtcatcaggtggattgataacgaacctttggtgcgtatcgtccaaaatatttttcgggttgtaactaacccatatctcgctgccgggctttcgaatagtggggatcagcacatcccaactctctttggttaccgcctcagcttcctctacccagcaaatatcgataccttccaatgatttcactttcgtgatgttgttcttaattccgtagaacatgaacaagctgttggtagcaatatgcctgatgtagaccttctgaatctcaaactcgctgttatacccttcgcgctctatcgtatctgcgatcaactgaataactgagtcggcgatactggcctgaaactcacgagcgcagagaaatcgatatgatcctcttcgcgctatttcaaccaagagccttgcaattgaccacgacttaccactaccgcgcccacccttagctaccttgtagcggtgtggcttgataaacggcttgaatactggattaagcgtcgtcatcttcaaaaagctccgatagcggttttgtcgcagtgatggttagcttcgactcttttggcggctcccatccctgcaaatctgccagttgctttattgctgcctttgggtcgtggagctttatcgatattccacgtttcccagcagtcagctcagatatagcagataaggcacctgcgctttgtagggctgaattcttgaaccgccatccggcctgaataatcggattgccattatcgtctgtaccgcactctgcttcgctaaactcgaccatctcatgtagggatgctcttgccatcaaactaaggcgctcaagagcctcctgacgagtcataacggcatcagagatggctaccttattcatttcgtcaacgaaggctctaaccttgggatttctatagatttcgcttgcgctagcatgagcgttctcttccttttttgccttgcccccagccttcctgtaggcgtctatttgggttaacccctcaacgatgcctaacgcaaacttttgctgtgatttggtcatggcatcgaatagggctttctggtgttcagttagctccatgtcgattcctttttgattgtcattaaacatggctcttataagaaccatctgtaatgtaagccgtctgttccggctgtcagtgacatttcatccgccatcgcagtcaccgcgaaccatgaggggcaaaccgtacaaaaccccggcgttatcccttacatcttattccgcgcactcgtcccgaggagaaccagtattactggagggagtcttcgttaaacgcgagagatgtgtttacgtgaagagggatggactaacacgaccactgagtggtaaatgaattttattcgccagactcgcgcagcctctcggatgtgctaactgacttacggcttacccgtcagcaagattggatcaccatcctttcggggttatgcaatctgtttccttgtcgggaggaattcattcctgtagtgctttagcgacaccgggaagagatatttgtccgcgctggtcaatgcgctcgattcgcgccagcaacgcaggtttttttactcgtccccagcggttcagtaatcgcccagacatgctggccacatctttctctttcatatattcgagcatgacggcgttgcgttctgcctcatagctttcactgtattttctgagctcactggtcatccagttgaaggcattgatgtatgcctctttaactgcatcagcctttgcaccattgaatcccatgaccaacataacgaagccgctgaagtccattcggtaatacttttgcttcttatcaaatattcctaactcattgattttctcgacaacccaaaagtgggccttcgtgaaatcagtcgagcagtgaaggttttccagtgcgcgaataacgtgttggtgtcttttgccaaatgccttggctatctggaatgtatcggtcaccggctcaccttctgccgccgatactagctgacgaaaatcaaaatcagggatgacctgtaaattgttcatagcgtttgccttactttgagatgaacctttgccgcataggaaatcagtccatcgaggctcgccagcactaactgacttcctcaaaggctcatttcaaagggtgggttcgatgtggttatttgcgctgcggtgcgcggggaaatgcggttttgctaactacgaaaatttcgcagtttgattagttgtcgatttgattgtttatttgcacaggtgaaatgaaggtataaaaaagccccaccgaagtgaggctataaagtggtaacggatgctttaccccgataaatcaggcgatttaagggattaagctttttcagctcttcttcccgcatggtcacctcctatcattttaagcactgggtgcggatataactctgcaacccgttaatcattatttcggattgtctgattcgttcgacgagactgagataattgcgttcaaactctgcatcatatctggggccggttgcatcaggctcgccggagggtgctgtggtttcgggcagctttggacaacttgccgcgatacgcagccgcttagtgccgtcaccaataccagcgcggataagatcaacttcactttttgcattggctaattcctgagtgactttgatatccagttcggctgcctgtacccgctgacgctggatgttttcgaggtctgctttctgctgattggctacttgagtgatttcttttagttcggaactaagtgactgcatctggcttgtcgtgtaccacatgccaactagtagagcgatgatgacagcgatcagtacggtagtgattctactcatgacaacaccgatagcgctttgctatatctagctttacggtcatcaaggccattagttccgccgttaataatccgtgtgatcttctctatatcaccagaatattttaggcagccatttgctacgtagaaccacgccgccgaacgcgctgcatgctgatcactctccagcagttccggattggaaaccaaatcaagccttagaccagcaccgcatgcgcggtaattatcctgaccggtaatctgaatcagtccgcgccctcggtatttccaaccatcaccagcatctctatttcccattcgaccgccgtaaaccagattagcaatggccggttggttggctggatgagctgacgttctgccaaggtcgttagcctgttgagatgttactcgcttaccgaatgttgaaagcaaagcttgcggagtgtaattcaatgattctactgtctgcttgaaactaccggactcatgaccaacctgagcaatgaacatcgcttggtctactggtgtcacaatgccaaattctttcattgccgcgtcgatgtgcggaaaccatcgagacgctaaatcagcactgatgccagcggcctgctgaaaatcactaatttgcatttttcatccccgtgatacgttcccagaaaaatgacagcgctacgctacccatcgtcccagacataccagctacgactaagacgtaataaatacttagcccagactcaatgctgatcagaccaccaatcaatccagcaaagccagatacggcaacctgagcgaaagcagccacccagctccatgccgtcttatttgtttttgtatcgatgatgtatttaacgaagccgccgtaaatggacatagcagcaataagaacccatacgactaaaccgtatgagctcgggtctttgtttggcatacgcatatccacctccccgatagggaacggcgcttttattgtgtgtagggaatagcgtcacccgtatccatgccagacaaggaatgtgtgagtgcagttggttggttttggatgacgctaaattagaattggtgctgggcaaaggaatcgaacctctgacgcgctgcttacaaggcagccgttctaccactgaactagaccagcagttggcgcaccattcagggatcgaacctgaaaccgatagcttagaaggctattgctctgtcctgttgagctaatggcgctaaatgcaaaaagccccgagctattaactcagggcttgaaattgggattgtggtggctggtgctgaactccagcatggtggcgataggcgcatggcgtcgcctcgttttacatcttgtccgatctgccgaactcctcagccttacacgcgtagctgagtggctttatcggtcttgccagcgcgctgagtgatcctcatggattatctgacaagttctcgttcacctgattagcgcatcagcctgcgcattcaccacaactgtcatgagcactgctcagcgccagacctgcgaagaaggcggattcaggttccttcaatactcatgcagttgtgcagcataccaaacgctccggtttacccttcttcgctgagtgatgtgctgaaaaataaaaaaggccagcgattaagccagccttttctttgttactgcgctctttcgcttttgctcccgagcatgcatcaaatttataataatgcttgcccttttgctttagctattcgtgctattaagctgcttgatgtagaatttctttctccatttctctttttgatgagtaatagagttccccatcaaggatactttcagcccattctattctatttcgagactcttttgctgatatccctgtcaatgcagaaagcgatcgaatcaagtcttgcgagcttttgcgccggcagtattttaatctagccatagaacgaatcgggttatctcttcctaacaccttcgttatcagtcgctccataaaggcggcatcatctgattctttggcgagagcgatgatgttgcctgctgctgattttggaatgatgatatctctggccctgcggtgtagctcctcatctcgatatccttgggcaaaaagctccgtgacagtgctttctatctgcttgcttttctgttcactccattcgcatcgcatcattaagcggcctattacattgacctctccgcgtggagactcatcgcctcgcatatgatcaccccaaactcttagcatgtagcgtatccactgtcgctgggagtcgttgatagttttccatccattaccaaacaaacgacgcatatccgtttcacggcgtatgaatgccagcttggatagttgctcaaggtcatatctatcttgtctcatcgcttaccccacctgttcttcccgcaatctccgcgagctgtcatgaatacgccgtttactatggcgtggcgcttagcctctttgtcgttgaggtatttggatatagtttctctgttgatgtgtaggcgtcgtgctagctcgctctgattaccgtatgtatcaactagcatgtcgggtatggttcgaatttcagcattcatgcagcctccaaatgttgcttttcgatgcccctcaatttctttctgtatagcgccctgatgctgtccaattcttctctggtgtatcggtatgtctcgttgttactttcgagcgcctcgactcgctcaagcccgattttctttatcaggttgagtcggtatggacctatatcaccggatttgtggacgttacaggcagaacattgaaggtgtacgttgtcttcgttaaatctgagatgtgatgcagccgccgttgtcctgaaatgcccagcgtggaaactgactgcgttcttagttccacagctgatgcatccacaccctcgatccctagccctgatgtagtcgttgaatactcgctgagtcatgtttatccagtgggatagcggctttgcatctgccttgcgttttctccatttgcgacgagattcatcctcagcttgtttctgctgattctctttctgtcgtttttggtatttgattgcgcagagcggcgagcaaactatttgaaggggtctatcaggagtgaatttggttttacatatcgggcatttctttggtttcggctttttagccttgagcaattggcacctccgaggagtatgacccataccacaatccatcttgatgaagctctaaaggcactcttatggtgttattagaattgggactaatggttctgaatatccttttggagcaggaaaatgagcctgttttgctaacttggaatccatcggcaattaagccaactcgaagcatttttttctcttcatcgatttcaatgtctatccgctcaccgctcaagcaagtcgcttttgaaacgtgaactccggttgaaccagatgttgtcattctgaatgagattattggctgcccaacaccgcggccgcgaagccttagtttttttacctgtgattcaaatgccattctcactctccttcatcatcaggtagacgatcatggctgcgcggagggggttcttatcctcaaccaagaactttgatgctatgccaaatttagtaggccacgcttgagggagggtgtgacgatatggaactatcgctatattattatcaacaataataggccatgcatctgatgggttgttgcagggggcgaagcggcattcctcctccgcgttccaaatgtaatcagcgtagtatgtgaatcttattggtagcgtttctgctacccgagagttaatttcgtcatcagacaatttgctgtaatcagtcatgtctatctccagattttggatgtctgtatttttgaattaggtaggtaatttgattcagggagaagtgcttgaacgaaccagtgacgattgtctgctgatagtgatttagtggccttcactccgttgtttttgtatctatcgagtagttgattagcttcttctgtggtcatgggttcgtgtgtaaaccacgttcgcttcatctgcgcctccatggttttcttttcttatcccgccatggttcattcctgttgtaatggtcagtaaatggttttggcgctgattcccataatccaatcttcgacgattttttctgtgtacttgctatgcagtatgcgattgcatatgaaataactgtttccttcatacggcctccggtggctcggggtcggcagctcgatcggacttgttcttgtagtaaacagcccaactcagtgcatccagtttctttcttcccgcggcatcgtagatataaatcccattcctgcactcatggttctctttcacatctgcttcaagtctttctaattcttcgtatgtgagtgtggctagcttgtgcctgtcccatccgaagttacgtggtagtttgctcatgctgctgaactcctgttgtgttgttgagcccagcgcattaccgccgatgactcttcgctaaacttcacgccctgctccgagccgaaccagtagatagcctcaataacatcaatcatctcgcttactctcatcttgcttgtgcgctggccaaacatgacaactccgccgccgatgcccggtgcggttcgctgctcttcttttttggtcttggctaccagtgcggtaatgaggtctttccaatcatcttcgtcgtacttctgcccataccaaacaacctgctgagctaggtcatgcaagagtggccacattttcctattttgtgaaagcgtgcgcttgggtggggatagttcgatttcgtatggcttggattggtctagtgggagatttctgatttgttcgatggcgtgacttctgatttgctcggttctcaggtagaaaacctttttggtcatagttacctcgctttctgctccacgtttttgcactcgttttcagcatagagaatggctgtccgagctgaccttaaccgcgccttggcgttcttctcttcgcgctctaggttggcgacgttgctacgtagctccttcagtctggctgccagcgtttctatctcagtaacaacgcgctcgccgttatgcgctcgctctaagatgaactcaaacggatcgacaacgcagccgcaacgaatacaagtgattgttcgctctacttcgcttacttcgagtgtgtgtttgcagtgtttctgttgataggttttcagatttgtggggacaatgtttagcagctttctctcttcgttatccggctgaactagctgcactacgtttgccagatcatcagtttcagaagtcatcactcctccttcggtatgctgcatacccattggtctaatgctttttcacatacagctctgttctcatatacggcgatagcacctttagccattatctgctggtctctactatcggtaggaaacgcagcagcggcaccagcggcgaagccgataatcatcataatgatggtgcctattgaagacttatccataactacctcctgtatgttccttctatgagaattcggtcatgcgtgacaatcccttcgcacttccgttttagtgctgtctttaacgcatcccttttgtactttttaaagctgaactcacgcgccaaggccagccaatctctatgcattctcatgtaaacattcagcacactgatagcaaccagctttcttgcgtatgtcatcactcccccttaaccttgatgccagcggcgcgaatagactcgatacatttagatcgcatcctgttagagaagcccgcgctaatgtcgacttgagaatcggttccgctatctggctctggtgctggaagttccacctccactgcctcgcggcttgcttgccatgcctctaagaaaaactcatattgagattggataaatgcgtatttatatctaccaacattctcattaaaagccattgaagcttcaggctctcgcttcatataaatcgcttcaaactgctctctagatgtcatcgtttccctcccgctccggtgcttcatacaactctttaatcacggcgtctttgaatgcccagctattagtgtttggcttgttgaatacaactgttggcaaaccaaaattatgctctatagcccacgcatacggcttactcttctcttgtgtcacatgctgtgctgtagactctatttccacagctttgcgggatagttcccaccattcgaacgcctgcctagcaagtagtgagtaatatccccaatccggatcatcatcagtgccgtggttataccactccagcattgtgtctttatgggatgggggaatatctggatatgcttttctaaatgtctcttcaaactgttcactacttgtcatgactatctcctaaaagtatttggctctgagtccgcaggcgttgcccttgtccatcgcccaatttacggtgtccagatcccgagcttcagcaataagacgtgatatttccgtttgcgctcgacgaaccaatccgcgattaatcagctgttcgatttcctgcttcttggccccgaggcttacggtattgtcttttgctgtaatgactgttttctttcgtgctggcggcttagttttggcgtgttttggtgcttctgggataccgtaccgatatttgccgcggctccccgttttgatcagcattccgattcgtgcgaggtatctcaggcttgagttaacttctctgacgctgaatccagtacctctgcatatttctcccatcggcgacgcgccatgcttttcgatgtgggagataacctctctaatttttgacatcacgcaactcctgagcttcagtttcaaaggcatccgctcgccaagaatcaacgcgatcaaccattccatcgtagtgcgtctcacatgatgtgaatccgtgatacgtgaggccgtcgccgtattcgagatactgatgacacatgcaacacttgctcattgctgacctctgcgcggtaggtttagctttttgcgaatatctgcaattttctgtagcccagcttcattgctgatcggaatgtgtagcttttccaactgaacaactggctttggtatttcttcaccagactcaatgcgccgccccatgatcactaactcttcagtgcaactcttgcggagttctgattcagactggttcttgccgcgcatctgcgaatataactttgtcaccatccagtaagtcgcgttgctaggccacggatacgactctggtgacgaatacaatccacggttagcgcagtactccatcactaggccatacagctcttcgctgctgggcaagccgttagctttcagaacaccttgcttgcaccatgcgataaattgaccgggtgaaggccagaacggagactcactggatcgggcatgttgcatccccgcagatagctgctctctggttcgaattccattctcagcgaatgcagcaatccactgtttttttgctgcgttctcgtcttcaggcctacgcaggttggtttggcttgctgctgggaacacctgctttagctggcgaaacagagcatcaaccaagttttcagcatctggattaaccaccccctgcattgcctgtgttgttgggttagacattctggccagcgccgaaccatctcggtttgcgatagcgctcatcagtcgatgtgtcatatgaaatcctcccatgactctttgctgttccagtgcggtaccggatcagcgcttggtcgttggcttcggtttggcttgcccatctgggcagatagggttccccattttttccgcagagctgctggggataggatgtttgagcaccagaacgaatctcggtttgcccagagaaataactcacaaatctctttgtgcgttcggttgtcttgctgtctcatcagtcgaactacgtttgcccagtccgcccagttgggttcttttgctgatgcatcaaccacgcagaccttctcgtaaatccagcgactagccatgtcgtcttcctcagtcccccacttggatccagtggctgagtaaacaaacgcatctggatgagctgagagaaactttgaaatgggcttgtcagatgattcgagagaatcatcggacgaagggtttttattactgttcttgttcttgtattgggtgtctaccgttttcgggaacagttttcctgattctgggaatgattttcccgttttcgggagctttcttcccgttttcggtttgtctaaaatccatccagataattcggtgtttactccaacaattttcatcactccctgcttctggctaaagatgatatttctctctgctaaagccctgatagcatccgatacatgtgtgtcgctcaaacctgtcagctcggcgattaccgtgttcgtcaccctgtcctgtttcttattccatccataagtgagccagatcaccgcctcgaaacattgccattccctgcctgacattctgaggcgtggttttagctgctgaatctcgttggcgacctttgtgtacccattggacaggtcagccatacgcccccctgtttgttcggttttcttgggaaatcttattacctctgcggtattcattctgaatcctccacttcgtaatcagtgaagtaacctttggacatggcgatgaatcgtgtttctgtcactgtgtatgctttcctgcctttcctctctcgcccttcagggtcaataagatgacaggcataaataattcgccgttgccacttacccggcatttcagcgacagaaagaacctctaggattctttttccttcagcgtcggcggtataaaccatctgatcaccataaccacaatcagctggctcagatgtttttctacatccaccaatccaccgctcatcagtagtgacatcgccgttgtatgactggtaatcagtggtgataaatataaatggataaacggtttcaaacttatcgccgctccgtagatcaatgtttacttgtttagtttgtcctgacataattactcctgtgaattgatccagtactagaaagtcatagtgatctgtgaatccccatctgttggcgcggctggggattttttctttccaatcgttttgtataagtcctgcaatgctctccctatcggactcacctcagcagcaatccctaaagcacatataaccgatgctacgaagcgccagtcagttcggcttagcttcgattcatgacagccaatcatctttgccatgcctcgctgggtaagctgtgagataccaataagtacatctgtttctgcacgatcaacatcgcgcgggtttaacttgctatgagttgcatgttccattgattaaaatttccgtgttgaataaatagttacaccaccggttaggtggttggggtttccccacattgcggcagggaggccatgactgttaaagagcggtgttgcttaagcggcttgctttttggtatcgccaaacattagccaattggctgtgcatttcagtgcttcggcaatctctagcaggttgcgaggtcgtttggtttcacctgcttccagctgctggtatgactgctgagtaatcccagcttgagctgcaacttcagcttgggttaaaccaagttcagtccttcgctgcttcactcgctgggagagggttttgtttgtattcattccgttctcctacagttttatctgtattgttctacaggaaagcctgtttgtcaaatacagtatttactgtgaagatctacggagtttgttaacactaggagaggatttatgagcctcgcagaacgagtaaaagaaagacgtgaggcgctaggaatcacgcagacagaactggcagaaaaagttggtataaaacaacaatctattgctagtattgaaaacggagagactaagaatccaagaaaaatattcgagctagctaccgcgcttaaatgttcaatgcagtggcttaagactggcgagcacgaatcaaacgcaacaagcttagaagggatctctctctgggatgatgatgatgtagatgatgatgatgatgtttatctaccattcttcaaagaggctcaactcgcagcaggaagtggcagagtggtagaacttgattgtgatgggagaaagcttaaattctctcttagaagcttaagaaaacttggtgttaaccctgaagatgcggcatgtatgtctgtttggggtaatagcatggaaccagtgttacctgatggggctaccgtagcaataaatacaggtaatacagagattaaggatgggaaaatctatgccctagatcatgagggcatggctagagttaagatagtttatcgccttcctggtggagggattagattacgttccttcaatactgatgagtttcctgatgagttttatcatggagaggaaagcaataagataagagtagttggcgccgtattttggtatggcgtgaccatcaaataaccatcacaccatctcacaccaacccgccatgtgcgggtttttttgtgcctaaaaaaactttaatacaagtaaattcaattacatactcaaaaacctgtaaaatatacagtttaaactgtttactgaatacagttttgcctgtacagttatttccatcaacacggcagcacaccagatcaccggaagcggccagctctttaacaatcagaaggtatgccgagaggtgtacaccaaagttaagttggctttggggtgtggtgaatgcgcaggctgatgcgtaccgagatcgaaacgtaaggcgctctgcgctgtgatagatggtatctgcgggttgttccgtacaagggctggtgagtgccatccagcaagccggaatatttcagtaccggccaccacatcaccaaagctaactaacggagaaatccatgaacgcaaaacaacgctgcaaattacgtcgtctagagcgtcgtagtgaagaaagaaactcagccaatgcagagcgccggttggcacgcaaaattgctaccacgctctctggatgctcagacagaacagtaaaagcgctatcactaccgacaccgagagctgctaaagagcttgaggtagaacataagcaatatcgggttgtgtccggcgtaaacatttcagcgttcgggcgccagaagattcgcgggaagagcattcccttaatttagagaggtaggtatggagccatcaagaattgaatcaggacacttgaatagcatcctgactaatttaaacgataagttttctaagattaatggcgcagattaccagaatctacatcatcaagagcatcgtgggtgctttcaatggttaaagcgactttttcaagcatatcggaaatagtcgctctagatatttcatcatcaatatcagcgctatttatttcggcacattttcgaaggtagcttactagctctgatttatctattcccatctttttgcagaagaaactggctataaaggctgttgctgtaatgttgcccgtgtccaaggcaagcatcattttgatggcatcgtcgttcatattaatcacttactttgactgtggaataaccaaaatatcagttttccttgactgtggaaagttaggaaccacctcgcctgatgtggataaaagcaggcaacaaacaatcacaggtcgcctaggtggcctttttattgggtgaacaaggggtgtgagatggaagaagcaagaaaagagtttgagcttttatgtccgctcaacggattgaagaaagacaacccaatcattctttctgcaaatgctggcgttgtttatcgtgatgtcaaaacacagcaggcatggcgcttcttcttaaaaggatggagagctaaatcaaaagcccgcgccgagtaatgcacatcgcaggtattcactgagtatctgctgtgagcaattctctgagcgtcacctgcccgctcaatacgacgatgatggcagatagataacggggtgatctatgtagtctgtaacgctggcgagcgaatacgtatccacacggagttttgattttgcccctctcgttaggggcttttttatggctggaggaaagtatgaccgacttggatttttgggaagagtgtatttcattgggcgcggaagactgcgacctgacgctgacaccagagcaattgaagtgcctagctgagtctgttagtgctgggcatgaaaactacggaatggccttttacagtccgccagactccgacagatatgacgacctcgaacgcgagtctcaatcaaagctaaagaaattgcaggctgaatttgatgcctatcgcaacaacgccgaatcagctgttaagcaggctctgggccaatatcgcgacgctaatgtcagcattggcgaccacggcgaagtattccggcacgatggcagaacagaacaaattcaatagagccgcttaaatgcggctttttttatacccgcttcatcgcaaagcgtaggcgttttgcaatgaaaccaacaaaggagatcgccagtgagcgaggaaaagaacgaaattgcattagtcactctgccgagcgtaccggctgagctcgaagctgcttttatcaatgacgaattcattgaagggttacttaaagacgtccgtgaaaaagcatcctctgtagttggtgacctgaatacagccaagggacgccgtgcatacatcagcatggcggcgaatgtccgtagcactaagaccgctattgatgaggctggtaagaagttagttgcagagatgaagaagcgccctgctcttgtcgatgccagccgtaaaaaggttagggattcgctggacgaactggcggttgagattcgcaagccagtgactgactgggaggctgagcagaaagaaaaagagttcaacgctatgtgggatgaggcgttagagctggatgccaaaattacagcggaacgcgccgcggctttggcggcgaagattgaagccgatcatgaaatggctttactcatgaacgagaagattgaccgtgagcgcgaagaagcacgacagaaagccgagcaagccaaacgcgagcatgaagaacgtattaagcgtgaggccgaagagaatgcgcggcgtgaagcagacgaagcggcaaagcgtgaaatagaagcggcagctgctagagagcgcgaagctacattggcgaaggaacgtgccgaacgtgaagccaaggagctggcagagaaagcggagcgcgaccgcatagaagcagagcagcgagctgaacgcgagaagaaagaggccgctgagcgtgctgaacgtgaaaagcaggaagccattgccgaagagcaacgaaaggcccacgaagaagccgagagaattaagcgtgaaaacgagcagagggaacaagctcgattagatgaagaaaagcgcataaaagatgaagaagctcgccgcgccgcagatatcgctcaccagaagaaaatcaataatgcagctatggcgattcttatgagtactggcttaagcgaagcagcagctcgggaatgtgtttgtgccatcgttaagaatcaaaaagcgttagccgcctcagtccagcgcccacctatcagcatcaactactaatcaaattcaaagcaattacaggagggttgaatgaagaagaaattaatatctgacattatttcaattgaagagcttaacgaattactttcatacaaccctgaaaatggattatttacccacaagacaaacaccacacgaaaaagaaagggtgaggttgctgggtttaataataatggatacataagactaaccataaaaggacaggtagtttccgcacatcgcttagcttggttttttataaacagtgaagacccacaagagctagttgaccataaaaatggaataaaaacagacaataggataactaaccttaggattgcaacatattcacagaactccatgaatagcaaaataagctccttaaactcaactggatataaaggggttagatggagtgaaagtaaaaaaagatggatagcgcaagtaaaactaaatggaaagaaaactcaactcggtagttttaaaaatataaaagatgccagtaatgcttactgcgaattcgctaaaaagcatcacggtgaatattacaggagcaaataatgacaccatgtttatcagggtgcccgttcatgggcgcttctcagctatcagactctcagttagaccgaaacgtatccaaattacgtgccggtttcaaaaaagcattccgctggtttatcgacaccatcacgcaaaaaggagacccaaatgattattaagccaaatcaagatggaacagtcaccgtaagccaagcgtggtggcgtacaggagtaaagcactcccgtcagttcactagctcacaggatggcatcaagaaggcttacgcatgggctcacgaagcatctatgggctgggctgatgagcaggatgaagagtttaagcaagttatagggagacgcgcggcatgatagacgaaatcttaaagaattatcgccaatctcaggcacacctcgactcattaaatcaggttagtttcatgctgaaaaacggaacgattagctcagaagaattggctgtaatggcgctggaaaatatgaacgctaaacctgaatggattagtgaactacgccagttggcagaagaaaagcgcaagaattttttggaggtgatttgtgggtaccgcaacgttaattttaggtgagtcaggaacaggtaaatcaacaagcctccgcaatattatccctgagagttcacttctaattcagacaatcagaaagcctctccccttccggtctgccggttggaaaaaatggaataagtccgaaccaacaacctccgtgttcactaccgataactggcaatcaatcatcgcggcgatcaaggcggcgtccggctacggtaagtccatagtcattatcgatgacttccaatacctgatggctaatgagttcatgcgccgatctgacgagaaatcattcgataaatttactgaaatcggctctcacgcatggaacatcatagataaggctattaacgaaacgcctgatgatttgcgtatctactttttgtcacacaccgaggaaacccagatgggcagagtgaagatgaaaactatcgggaaaatgttagatgaaaaaatcacggtagaaggcatgttcaccatcgttctgaaaacttcagtgaaggatgggcagtacctatttaccacccagaacagcggttcagacccagttaaatccccgatgggcatgtttgatagcccagagatagaaaacgacctacaagccgttgacgctgcaatttgcgaatactacgggatcacaaataacgttcactcaatcaaaggaaatgcagcatgacacagccattatttgtttataaccaagagcaagcggtatcagcaggacagagcggctatatcacagaaagtggggattacattctcacgatagatgaggcaaagctatatacgaccgaaagcaacgctaagtttatagagttttccggtgaaactgatgatgggcgaaaggttaactacctgagcgtatgtgtatttaaaaaagatggttcgccaaatacgttcggtcagaacatggttcaggcaattatggggtgcgcaggagtccagcaaattaccgaaaagatgctggcagtaaatcacgttattgcccctgaattcacaggtaagcgcgttggtttggtactgcaaaagatattaaaaaccaagaaatcaactggcgctgataccttcagctttgatattcgcattcctttcattccaaacactcgacagaccattgcagaaaaaattgatggcgtagcgcctgccgcaatcgacaagattgtttcccaactaagcgataaagacgaacgctcaaaaggttcgccttcctctagccagtggcaaggaaacaactccaatgaatatccaggcgatgaaaacttcttctaacaggtaaccacaatgacgccgcagcatatcctgcgcgtcctcagccagcaccccgacaataacatcaccgaattccacagagcgcttaactcagtgggcggcgtttttactggcggcggtgccactggcggggtgacgctgaactctaaagagccatattacacatggcgcaatcctgaaaagaacgagtacataagcttcaaccatcttctaacaatcagggaatatctaacagcggttccatggggagatatgaagataggcggtacggtttaccggctaagagatgatatcgatgtagatgctgttatcgagaaaatcacgccaaagcgcccaccgcctaagcccatcgttattcacaagccaaaagctggccagcgctacatcggcaagcgcggcattgagtacaccatcatttcagcctcagaccgcagcatcgtttatagcttcaacgggaaaactcatcagtcactcgaacctaccaaattcatgtacggcatggagcttatagccgatgccgcataggagatattcatgaacaaattaccgatacaaacctacgaatcagtagttcagcagcgtgatgcgcttgagaagaagctggctgagatggcggctgagaatgcggcgctaaataaatttataaaggatgattgctgggtatgggatgacaaaaacgaaacatatttcgatgcatgtgacggcattcctgaaaccacagccaccgacgcattcacccatgagttgatggcaaaaggtgttgagtctggagctgagaatttcagaagccgagcaaaatgcgctcgcggattaggccatcacgacagagcgtgtttcttagatacgacagcggaaatgtttgatgattttgccgcccagcttcgcaaggggattaatgatgcacagtaacagcaaagagtgtgagtacttcattttgagcgttcatcactgctctcgcgatgatgaattcattttgatgtttagacgtaataactctggatacgcattccgacttcaggcggcagggcgttataccgagcaacaagtgatcgagcatcttgggtattacaacgatggtgactgcaatatagccgtgccatgcgatgtgattgagtctttatcctcccctgctccagatggttactttgacgataacggcggtattgttgttctgaataatgcaaagaactggcgaaaagccataaagaacgccgtagccaagccaaagcatgaaccaaagccagaatatccacgcgcacgtagaagcaaggagcagagcaatgactgataacagcaaagagaaaaagctaatcatagattggcttgaatgcaacttatgcgactcaagcaatattgaagtaacaaccaccaacggcaaccaagaatggctatatgcagaagacaaatgccaatgcttggattgcggcgcgtccggtgtaattgaatgtgatgatggtattgcgtgggcaaactggcatgaggagcagagcaatgactaagttaacaactgagcgtttagaaaaattcgtcaacgatattaaaactgatgggatgtgcgacataactgattatcaagttgcgttggcgttgcgtcagcttttggcatacgagcaagcagcagatcgccctgtaggtgaaatatttagatgtagcggaaataaaaccctgcgttggtggaatgacgttccagagggaacggttctttatgcagcaccggtattacctaaacagtctgaattgatgagcattggtgagcttttgcatcgtctggaagaacagactggtgaaaagtgggttgaagaatccgagcagtctgtaattccggatgagataaatagcacccctgattatgtgaaagccctaacgaaagagggagcttacatttatgggtggaacgcctgccgcgctgagatgcttaaagcacaacctgtaagcgagccttacaagttacctcagggctggattaaaggccaattttcttatcaagacctctttaatgccattggtgccgcagttgtttctaaacatcagagtattgagataagcgtaaaggcttttgaagactcaatgcttgcagcagccccagcacaggagagcgaataatgcggaaagtaacgattagatataaaaatcgctcaatgtcgcagttctctcgagtgaagttggttttcgatgacggatggaacacgtttttttatgacgaagaaggcgctccgtttgttatttcaaatcaagcatatgaaaggctgtgcgatggttggccggatacacaaaatgaagtcaagttcatcacagcacaggagcagaaatagatgaccgttacatataacggatttttggcattcgaaaattatgagccgaagccagaagatgtatgcaatttctgcaaaggaatttgtggcaaagaaaatatggtaggtggcccagatgaattatcaatatgcctaccatgcattgagctttgcaatgaaattgctcaggaacgtaaggctgcacagcgcaaaggagccattacagagattacccgactgctattgagtgaatcatggcaaggttctgaagcggcagcggcgctctatgatgctggttggcgtaaggttgataagccatgctgatagccggttatattcttctagtcagcgcctgcggattagatgcttgcgacgccctccccgttacacctgaagtcatgccaaaagaaacctgtgaacaatggataaagctgattcatgagaagcggcctaatcatgttctgatgtgcttaccagttaaccaagattaatagccgcttaaccagcggcttttttattgcctaaatttggagaaaacatgcaaatcgaaatcggcgaatacgtcattacgagtgacacatacaacctgatacttaacgagaaaaaggtagcaaaggaaggtaaatcagcaggtgaagagaggcttcagtccattgggttctattcaaaaatatccacgctcatctctgcattaattcagcgcgaggttcttctgtctgacgtccagtcattgcaggcaatgcagcaattaatagagcgagtttcattgcaatgtgagaaggcttttaaggactttaacaatgcgacacatcatcaagggtaatccaacacagatagagctctcagcaatgaaagcggcgcttaaccagcatcaagacaagtacggtgattacgccccatctaaagagtcagaaaactacaccgttttagttgatggaatgaaaatcgtagttgaaatcatgaaccgtaaaaaatcatatgtggctacatcgatgatgcggccgcgtgagttatcgaaagtctgggggaatgcagcatgagtgaaattaaacatccagcgatcagatatcacggcggtaagttccgcatggctccatacatcatcagtcactttcctgagcaccgatgctacgttgaaccattcggcggcgctgcctctgtgctacttcgcaagcctcgcagctatgcagaggtatataacgacttagacagtgatgttgttaacctgtttgcaattctccgcaacgctgctcagcgtgaaagactgattgaagctcttatcttaaccccctactccagatgcgaatttcttggggcttatgaagaaactgacgatgtggttgagaaagctagacgactagtgatcagagcaacaatgggatttggttcggctggcgcaacgaaagggacaaccggattccgtttggatactaaaagagattcggcaactgctcagcacttgtgggcaagaatgccaaagaacttagcagctgtcggtcagcgctttgagggagttcttgttgagaaccgtgacgcaattcaagtcatgaaagaccacgatgcgcctgacacgcttcactttgtagaccctccatacgttcatgagacacgcgtcattagcagcaaatactaccgccatgaaatggataatgagcagcacttagcgctattggaaagcgtgctgaagctagatggaaaggttgttatctgtggatatgaaacagaaatgtataacgacattttaaccggttggcagaaagaaacgcgtcagagttctgctgctggccggcgcggctccgttaaacgaactgagtgcttatggttgagcccaaactgccagcaaggagtgaaagcggcatgacatgacggcagaacaagataacgcgatccgcaatgtggcaagagcccttctcaccgaactccgcagcaaaaaaacaacctcacataccgccagttactcgataagcattcagcaaagatagcgccactctgcggcagatttaagccgtggatggtgctgtcttgctactgcatgaaagtgacggataaggataaatgatggatgaacaacttctcaagttatcagccgtcgccaagcggctaaacgtctcaactcacacaatctacaggaacccagccaagttcaacatgttcaaggttggtggttcatggcgtgcaagagaagaaagtctggcaagtttttcaagcaaagttaacaatgccatccggctgggtgtggtcggtaaggagtcaatgaaatgccgatcatcaagagaggaaaaatatactgggtcgatatctccgctccagacggaacgcgaattagacgctctactcgcaccgaggaaaaaacgaaagctcaggagtaccacgacaaactaaagcacgaactatggcaggtcgcgaagctggataagatacctgaccgtatctttgatgacatagtgatccttgcattgcgtgatgcagagaaccagtcttgctttgaaaataagcagatttacgccagatactggttatctgttttccgtggacggatcatctctaaaatcacaggggaggatattgcaaacaacctacccactcactctaccgcgaagaagtgcaagctatccaatgccacccgtaaccggtacagggcatttattatgcgagcattctctctagctgttgcgtctggctggcttaatggcatgcctcacctatcaacacagagagagccaaaggttcgtgtgcggtggattgagaaggaacaggcaaggatgcttatcagtgccttgcgtctggattggatgaaggatgtggtttcatttgcgctgcttactggtgcgaggaaaggagagatattttctctgaaatgggaaaacgttaacctttcacgccgtattgctgtggttacggcagaaaatgcgaagtcaggtaaagcacgaccgatccccctcaatgatgaggccgtgaaaattatcgctggccgtagccgtgattctgaatatgttttctcagtagacggcggtgtcattaaggagatcagccgcgctgatttcgcaaacgctttgaaggtttcaggtatcttcgatttccgtttccatgacttaaggcacacttgggcaagttggcacgtccagaacggaacaccgctgatgacactgaaagaactaggtggatgggagaagctagaaatggtcaataaatacgctcacctgagcactgagcatttgagtcgttttagtggaattgtcacgtttttggcacaagatgaaagcggtaaagaaaatcggcctgctttatcacttgtaaattactgatttaaaatgagaataaaggcgttattcagaatttaaatctggacagcatcagaaaaacagtctgatgcactacaaaaagttacgcattctaacagccatgaaacccgcaccacaaccagcctctttatttcagcgcggatttcctttgtatatttttggcaaattttgccaattttatgacacaaatttggcacagtagagaattaccgcaggccaccaagctgatgatctgcgatagtgctctctccctccatcttctcccccaacatttgacgcggtattcgctgtgggctatattctcgatgcacctgcaaaatcaggtgtcgggatttgcaacccgccgagaattctaccgcgaccaaatgacacgccgcgagcgtgtttttttatgtcgtgcacttagtcacatctcaatggtgggctaggtgggggagccgaaaggctcgccggttggtagattccggtattgcaaaccccatctagttcaccaccagagatttgcaacttcggtggtgataacaacaaaatctaccactggaattcatcatgaccactcacatttctgttgaaaccctatccccaatcacgcataaaaacactccagttataactactgagttattggcaaaactgtatggcaccgacaccaataacataaaagtaaactacactcggaacgccgatagatttatttgtggtaaacactacttcaagctggagggcgctgctctaagggagtttaaggacaaggttactcaaagtaacttagtcgcatccagagctaagcacctaatactttggacggaacgcggcgctgccagacacgcaaaaatgctggaaacagatcaggcgtgggaagtattcgagaagctggaagattgctatttcggccagaaagaaaatagccaagaagtagctccagtaaaaccacaaactcatacgatcaccctgtcagacgaagagttctgttctctatgctatctatggagcacagcagacaaaatgcgaactgacgctaggaaactctaccccatactcgtagacctcggatcaaagtatgctggtcgcttttacgatattggacacgagttcaactatacgctaaacaatgcacagaaggccctagcgcgtgaatcaatgcgcattgagcatcagcagcgtatctcgcagaactggcagcgcatacttccatatcttcgtgatattaagcattaacaaaagttaaaagtggagcaatgtagttaattattcttaattgctccacttttaaaggcttaaaatcatatatcatggaattagaactcaaatatcttttggattattaaaatctaatgataatatctttttcccaatagattttttaccatcaataataatactactttctatgagattaccattccctgatgaagcagtaactatttttatttttcttttgtttacatcattgttcataacatcaagagtcacttcgcaagttaccgagccattaacatctccacatgactctttatattggttatctggtaaagactttccggaaatatttttatacatttccatagagaagaactttgacactgattttgcatagaatttgtcctctctattctcataaatcatagatgctataccacactcttgatcattcagcttcaaggagttgtatgtagatttacatgagttatatatagaccttaatgctagtctggcgtatttagctccatcattaccctttaaagcagacttagccctccttgtttcacccggagcgtaatcatctgacttcaagtcatacattgccttttgtactgcaatttcgtatagcttttcctgtaaaaactcagctttctccatctttagggttgggtgctcagtcaaataatccgcatagctccctgacccagcaaagacgaacgatgtgaaaaaaaatagcggtaaaatataaattttcatatttttggcaatcgcaatcagcgatgcgctctccgtttttgtaggttttgatgccatttatcttaactttttaaccactacgatcaatcactttggtaaaaaacttaccagaagtgctaccgttaaccacccagccgaacccgatgttaccctcacttatgagggtaacatacgatcaatagctgatcagaagcttctcaagtgctaaactcagccatcactcaaaattactcttattgacaaatgcttaagcttttaaccaaatacgcctctatcggcgttatcaatacagcaatccattggatagtctttgggttgctttgttatctgcttgggacaacccaagccgccgccaacctcgcagggttctgtgttgcagttacattttctttttatgcgaatgcccacttcactttcaaaaaaaaagcaactgggaaaagatattttgcgttcgtgactttcatggggctaatcagttttctaactggccatctgtctgatgtattcaaactgccaccaattgcaacattcttaatattttctccagcaagcgtaattattggctttgtatattttaatttcattgtcttcaagggtgataaataatgaagatttctttagttgttccagtatataacgaagaagatactatacatatcttctatgaagctgtgcgaagtaatcctgaactaaaagataatgattttgagataatatttattaacgacggaagcaaggactcgactgaagctataattaaatctattgctatagctgacccattggttaaggcaattagctttactagaaactttggcaaggaggctgcattatttgctgggttagagagttcaactggtgatgcagttattcctatcgacgttgatcttcagcatccaatagaggttatccctaaattaattgaaaagtggaaaaatggcgcggatgtcgtgctagcaaaaagtactgagcgctacactgatggtttcctcaagcgtaaaacaactagttggttttaccgttttcataacaaaattagcaaccctaagattgaggaaaacgcaggcgacttccgccttatgtccagagaaacagtaaataatattataagtctaccagaaagaaatctttttatgaaaggtgtctttgcgtgggttggaggaaatgttgaggttgttgaatatacacaagctcagagatctgcaggaaaatcaaagtttaatggctggaaactgtggaacctagctttagaaggtataactagtttttctactctgccgcttagaatatggacatacattggattaacagtgtcagcattgtcattcatttacgcagcatggatgattattgataaattattatggggaaacccagtacccggatacccatcattaatgataacaattctatttcttggcggcgtgcagttaataggtatcggtgtattaggagaatatattggaagaatttatatagaaaccaaaggtcgccctcgttttttaattaaaaaatcatccaatggtgatatagatgctaagcgataataaaaaatatttaatttcagcatggtctttgaccatgctttactatcttccaattatgatggcctcagtgtattacagagacgatcttgaaaggtcttttggtgggtattttgggtgggctgaaactggcagacctggtgcggaattcttattttcagcactaacattaagcactgataaatcattagacatatttccatattctatcattctttctgcgtctttcattgctttatcagcatattttgtgatggtgcttctgaatagaaataacataaagcacgcatcatttatttcatttttgtttatatttaaccctttttatcttcaaaacgtctcatacagatacgatagtttcgggatgtcacttgctgttcttttaactgtttattcttatgttttcttacataaaaacaaattattagagatggtaattacagcaatactattaactgcaggactatcaatatatcagcaatgctcaaatatttttatcgcattggtcggtgtggaattattatcttgctataaacacaacagtattaaacaatgcatttacagatgtataaatagggtatcctgctatatattagcttgggttttctatgtattcgttatagctaaattatttaacaggtacactggtagagctgagcttataaaatttgactctaatgcattcaatgctttatatgaaaatttacatatgcttttagagcttgtatcatcatatttcaatgagatttcattatatctattcttgatattgataatttcatgcgttttaactatcataattaaaacggtaaatgatagagacataacaaaaacagcatttgttttaataatgtcattatttgcatttttaatttcacttatggggccgtctatacttttgttgaacgctcctgtagtcccaagatcactagtatcattttcaatattatatatattaatagcaataccaatgtcatattctagtgctagaataatatatttatctattattcctgcgttcgtctccatgacatttagcgctaaactcggtaatttttactcaatccaaaataaatttgaagatgtagtattcacgcaactatcttatgatttatcaaaaataaaaggagtaaactctatcgaattttctggtagtgtatcattatcacctagagctaaaatatattatgaaagcactccactactgagctacttccagttcccagcaacacagtggatggcagcttacaagctaaaagaaaaattgatagataatgttgcatccggctacggctcggaaaaaaagaacacacttatcacaaacaatcttatatctaaaaattcacgaccaatatcatcatcaagcagttacgacatctacgttaatgacgcaactgcatttgtaagatttaaatgaaatatatagcccactttatagtgggctatatcatattggatacgttgatttatttattatattaattacagatgaaattgatacctgcctagatgatgagtttgagacatcagcccatctcgcgtacctcgttgttccatcaatgaatgttagcaggaattttgctttattatatccaacaacatcaacaaacacgtcgtacaattgctttgcattattctgcgttgcatagaaaaacatatacatgcctcctacgactgatgaacttttaccacctctcacaccatacatttctgaaatatcaagctccacatctgatgtggacgagctagtaacagtacatgtaattgaaaagcttaattgattcaaaaatattcctgatgatagagtttgtgttgaaatagatacgccatcagcaggcgaaagtttgacaccagaacttcctccaatattacctcctgacttcataacttgtgcatacccataaccactaaaatgatttaaagctatgccagaacctttctcaaaactaatccatacatctgtagcattttctggtttgctaacagataaattactataagttacatcctgagcggaagtaataactggaagtgtgctcttaggaactgaatcgtatagcgatggtaaaattaatataaaatcaaatgaacaatcaaatgcatcgtttattaatccaactccaccgttggttctagatggctggttattgatattttttctaactggtgtatccaatattagatttgaatagttagaaaagcctccgttctctgtaattacgataccaacattcattttacccatcacgcctacacgattatcaacagtgtttccccatggatgaaatttatctagagagttaccactcttattaaactttccaccgattgaataacccactggcgaaatttcactaaaccaactgtcagttgaattactttcaaaccccacggagttatcaagtcttgtatttgctacaaccatcgtgaatttgctggcttttccttcgtaattgttcgtctcatagaacccgccattattaaaaccgatgattgccccaccctcatacgtccatccgtagcaatgctgaacacatacaccaattgcattcacgccgactgtgtaatcagatgcttccagtcgcaggccatagcagttcgtcttgttagctcgcgtgaaatggtcggtattatcgtatacaggcgtatcagcaccaccatccatgatgtacccataggttgcagtcagcccagcgggtacaattgctcgatgctcattccagtacaccgtcacctttggcttatgcatgatcgggattgtgctgaaagtgatgtcttcattcacatacaggacgccgccgccattttctgacatctcagtcatagcagcattaaagccatcctcaccctcaccccatccgcgaacgtctccttcatctctccagcgagcaatctgtaattctgggtacttcgttgcaccatccggatcggatatctgccctctcagagtcgaatcacccacgctcagccatttaccagcaccgatgccgcctgttgagtctggcgttgatgctgcgggaacttccttagaaaatgtgccagtccagtaataccagcttttactattatcatcccagatgaagtcccgttcagactctaaggtggcaccattaaggaacgtgctcttgccgtcaattagatattcaactttgtcgtttacatcttcaactgatggcgctccaagattagctctggcttgttcagcattctcaagttctgataggttatttttagctcttaaaaagtgggtaaccggcaattgctggtctgtttcgttctggttaactagcagtactgctgtatcaatcgtatctgttgcttcaggtagctgtgtgagttttactttttgttctgccattatgcggtcctataccagccagcgagtttaataaatgagttggttatatttgcttgagctccagatcctgatgtccccgagctccctttcacatcatggagatgagcaccaatgtctacctgatgcacatgatcgccagccgaagcagtattctggctgccccaagtaccagtagatccacctgatacagctcggttattagggttaagcaacataatgttttgcattgaatgaacgtgggaaccagcgttatgtgtagtctttgaaccataatcaaactggctggttttcaggtctattgggtgagagtgttgggggagattagcctcagttagcgtcagattgtcgctaccaccggtctgtagaacgtcactgcctgtcgcgtttgccaagcggattgttctcccgttaccgggtaatctagcccacgtagagccagtccatattgtgtttggatttacatcattagcgaaccattcaaccttaccgattggatatcgcatgttgaacattgcgtttagcaatacttctacagtgatagagcgatcattcccgctctgattgatatgcaacaagtctccttcatcagcgccagaagcagatgaaaggtctgttaggtacttaagtgtaatatccgccatcaagccccctcgagcgctgcaatgcgagcattgagatctgctatctgcgcgtacatgtcattaagcaaagtgttcaaatgattggcggctaacttgctgccggctgaaatggaaccatctggcatgcgaaccggaggaacaaatcctttatcaaggatttcatctggaataggctctttattggattgtccgtcagggtaggtaacatcggtgttagcaaaagaggttatagccattaattactcacttaggcatcgcgccacatagcattgaccctgtgacgccatagtcacgggaaaaaataagaaggtagtcgtcgtcggctacgccgagatatgatccgttgacttcaagaacaccggataccgagccagcagcatcaagataagagccactaataaaaacagaaccgcgattaaggcctaacgcagtatcatcgccaacttgcattgctgtattggttccaacctgaagcgcctgtccggaggaaatatctatcccagctaatgaaaatccatttagaccgtaatcatgggtcgagtaagccctaacccctgcaacagaagcgtgatcgacgatagcgttgatgttttctggtacgtatggacctgttgcatgcacactgaatgctgctggtgatagttcgacgagctctatatccgtacttgaagtggctgtcgctgttacgaccattacgttatctggagtaccgctaaatgcagtggctaactttgcctgcataattgcgcgtctgtagtcatcatcagaccgaccatcgcgcccaacatcgacgtattcaccaaacctatcaagctcaatcccatgcgcgttatagatgctatacgtcaaataaacgtacttggctctagcttcaatctcagggtgttgtattcccacagcggaaaataactctggaacctgatcccccttctttagccaatttgtcggtctttcccgtattaaggcgaggaaatctacatcaagccaatcagacaccggtgacctccacatttgcagtagagaatgatgcgaatgaattttcaggaatcgaaatgtttgtttctgcaaatgtcgttccgtcagagctcactgttacagtcatctttccaattcctgtcgtattggcgtagatatatccgtaaatgcgctgagtgatcacatcatcgccaagccctaaagttgcgccataagcaactacaccctgcttgattgcatcgacaacggcagatggtaatggctcttcagtatcaagaagcaccacatcaaccttcacataaatatctatctcagttggacgcgagaaattgacgagatgtggcctttggtagcggtcgtatacagtaattgagattgaaccgtaggtagcaatgcctgcacctttgtatttccagattgcatcagcaatatcttgctcaagccctcctgatacgatggtatgaattgcctttggcggaatactatcgacagtggtcatcgtgtcgttctcaatgaccttggctagggtaacgccattaacctcggtgattagccgcgtttcaattgctggaacagttgccgcgccacccgatgacgaacggctttgatataaacgttgccggtagtcagtatctgattcacgatctgagcctgtagcgccttggacaaggttgtttacagccgtccatccagtgatggcgcttaccggattattcaaaccacctacaggaacgacaattggcccagcctccgtagcttcaaagatggccggagatccaattagctgccaagagagtccagaacttaatgacacagagtaaccttcaatgagattttccgatgtcagacggataacggaaccatttgcagttgcagagtactggcttgtagcaccaaccaccgccgccagaccgcttgctatgctgttaacggtgtcgccgctgattttggtgtacacacaatctaccccagcaatccgaatggtataggtcgattgtgtgttgttgctcacgcgaacctcaccatcgagcagagttgatcttgtaatcgatgcatcagatgtcaggcgaaactgataattaccaaatgaagcaatggaacctgccggaacaagtcgtgactctgatccataaataacggcgttcacttttgtcgtggttttaccgtgacgagtaattccgcccatccagtcgccaatggcatcaagcgcgaaaccttcagccgaagccagaaatcggctagaccacaactcttcttctgtttcaaagtgaattgcgttttgctcggcctcaataccgatccactgtccggtggtcgaatcagcctccctgttaatcggtccgacgaccgtttccattgcatcaccgatttcttgaaccatctccggtaatgtcggcttatcaaagcctgtagcagtaatgtaatcagccataatcaccttatttcaggcataaaaaagccccgcacagtggcgaggcatattgagtggtgggttatcaggggtactgaaccaacccgtaatctgtattagcagtaaaatcgatacttagtttacggttctcgcgctcaaacttgtaagagaactcgacaattcctgtaacaccatctacagctagaatctctgctcttatcgctgatagcgctccattaagtgtaacttgcttgccaagcacgtcctgcaaatatggtgtgccgaattcactatcaagaaaccattcccctcgccacaggttgagcctgaactcaatctgctgcctgacacgctcggcaccatccacaaactgtaaaaggccattagtgaatacaattttgttgtcggttattctgaaatcgatcattagttttctggcccccctgttgttccaccgctatcccctgggtgtttatgtgtggcaatcttgatgccattaatcactacatcgccagttacattcatagtcccagtaatacttgccactgaaccaactccgccagaaccggtcattccaccttgatatgtgaacatattttcaacggtcatttgtcccttaaccgtatggagaggagtggtctcctctactccgcccggcgcatttatcgttatttttccattggcatctatagctataaatgcatcaccatgatacatgcgcatatcgtcattacccggaaccgcatcactatagccagctcccggtattacgtaagaatcgattatgtcgaaacggcgagtatcatcactaccatctattgcttgctgacaaacaatcaaaaaacactggtcaccggccatgacaggccccttaatgccagcttgaccaccggcgaattgtggccagatcattcgaaggtcgcttaagattgggtaagcgttcgtatcaccatctgagtatattttatccccatctggctttacggttacccttccagcgttataactaacaactgtacacggcaatgcagtgttaaccgtgtccatttcagtgcttacgagccgccttaacgcttcaaccacatcactgttatcagccattaaatgaacctcaatagagcctctacgctccattcctgcccatgtgtatcaccactataacgagcctcttccacacgaaagaactcaccatcaatcccgcgcgatttcacctgcacataagcgcccggataaatcgccggattaagtagtgatttcaccctgtagccctgcacctcaagcgtcaccctgtccttcaacttcgcggtggggtcttcgacatcaacaacggtacgcacaatccctttctgaccgtacttaatcccctgcttggctgcagtcttctcggtcatcgtctttgcttcgcgtcgtgggtatccaatcatcccagtgtctttcgacagaacaaccgccgtatctgcgtaaactccacccttcttgatgatctgaatttccccatcctgtgcgctccactcaagcccaagataattacaaaccctatccatagcatcacgcaccctgccgttataggcgaatcctcctacatactgcttatcctgtaccttgctaatgcttttcttaattggtaagccaaagtttttggcaacgccatcaagtaccgtcatcgcagaggtgtttggggggaatgaaacactgatcttcgcgtcacgaagaggaataatgctatctagaagctccatttctgtaatggtgtctggaccgtcctgataggttaggctgcggcaattggttcccgtgaatatggtaattgccccaatatcttttacgtagccagctttgatgatgacgatattattaatcgtctctagcatggtgatcgtgcttggagctgcattgtagattttaagagaggcttgattggctgttttgctggctgtttttgtgatgtcgaactcgaatctcaggtctttaatgcttaccgcatcgccttgtggctgaccaacaactatctcacccgttcgtagaaataaactcatttatctcttccttagaggcatagagcaaaaggtgatctccaccaatggagtcaatatctggtctggttttctcgccataggtacgaatgaaatacagatcgccagtaaagttatctaggctgaagttctttagtaaagggtaattctgaataagctttactccagttatgatgggaacagattcacgatcataaatacctaaggaccagaatccgaacctctcattccatcgcaaccttagagatacaggagtgtcatcaaacacagcctgaagtgtctggtcagtaaatcctgcttgaaagtttaatggggtcattacgtaacaccgcctataattttacctagataatcacccagctttccgctagcccctgataagccatcagatgcctgtttgagaattgaaccagtatttttaccgttatccttagtgggagtcgctcgattcgctgttgccggatctgatgagttggatgttcccgctttagaagccccagacgtcccactatccgatttttttactccaactccgggtggaagttcagtggttgcagtgctaacgatattgcattgaacggcatctatagtgaagttaaccgcatccccatcgccagccctacgaggtatatttattgcttgaagaagcatgttctcgtaggtgtaatttttggtatagatggtgactaattcgtttgattggtaaagagaatccagtagcttgattgccgtattaaccctatcctcgcctgaaaacccgctagctaaggcatttgatagctgtgttaaaacaccggttaccggcgcattgctgatcatgcccgcaaccgtgagctttcttggctgcctgataatatggtcagatatcggtgaaccattctctacagggttcattgtgacatcacgattccactcgtgtgtctcctgatctaaggtgtcaaattctagattgccgatagatgggtcattaagtcggaatgtactgtcgcccgatgtattccatagaaagccaagcacatcagtcgccatgctagccccctgtattaaagttaagagtgttgcctagcgcgttccagccaacatcattaaaagtgctctgagcgctatcacgcaagaattgagcttgctcctctgatgtgccagcaggaacagaaatattgccaatatgtacatcaacccttgggccatacatcgaagaggattgaggggatgacagagactgataacttggtagcaaactgcctgtatccgaactgtatttcgatgctccagaaagaacatctgaccatgttttagatgcatcaaaagaaccaattttctcttttaaccacggcccaaacttagtcgtaccgagtttatccccccactccttcacagtgtcctgactggaattgaagaaatctgccaaactattaagggtattcaaagcccagacagccatgtctttcatatcagtcaaggctaccttcagtgagttaatagcatccgtatattctgttactggacctatcatgtcgcctagcaaagacgggctaccactcagccaactattaacatcctcaccaaccagaaagagcgcggctaacgcagcaataattaagaaaaccgggctagttaacgcagtaaatgcagctgagagaagataaacagcaccgaccaatccagccgcacctaacgcgacaccaagtatctttacagcgttctcagcaccaccaagcgcctcagtcacaacatccagagagtattcaaccttgtcagcaagccatagaaacttactcgctatccaagaaatcgctgttgtactgcggttcaaccggtgaataaacatatcccaccgattaccaatgatctccatagcttgatggactgtcattggcattgaggaaaattcctttttaacttccccagacatatttcttagcgcgttaacgattttatctgcgcctattccaccgccattaccttgagtggctttcaccatttcattcagtgtcatgcctaatgacttggccagtcgtgatgcgaatgcatccgagttttgcataatgatacgcatatcagcccactgcagtttccccactgcgatggcctgagttaactgcatcatgacgctggttgtttgctgagtgtttgcacctgccagctgcaatcccattgccactgagtcagtaacattaagcagatcttgttcagacttgattaactcatgtgtcgctgcaccaattcccgtgtaagcctctgcatacgactcgatatttacacgagcgtcactagcatgctttgacaggttttctatggcctctgcgccaccgttcgttgaagtgatcatctgaccgagacgaaactctagtgattgcatctcatcagcaacgtcaatgatggatttaaggctaaacccagcaagagcaccagcaatagcaccgcctagccctctgaatccctccgtaacctttttgaccttatcatcaactttatcaagacttctgcctgtggcctcgctccctgtcagcccaagccgaatcaatagctctcttattaccatctacttctccggtggcatgttcagataatcggtcatctctatcagagcgttgagttttaacaggtcttcgcatgtcacggctcccgacttaacctcagaaaccgtacacatgttccttaaaataggcttccatacccaaagctcattctcgacgtcgtcccttagcttccctgactcgcgcctttcgttagtgcttgaactcggcttgccagttcttctgggcttaacccaaacagggtgagtactttcgtgaaaaaaggggtgaagtttagcttcatcacctcccagcacagctcaaagaaatcgaataacgtgtctactgtgaacacaaagttaatcgcgttagggctatcaattttcttctcatcgctcacactgataacggatgagtctcgtagaattgggatgatcacctcttccagcgtcttttcatcaatgccggctagcaactgaatggcgtttgcatcaccacctgaagccagacctttatctagaagtgtcttaagttttactagatgcttggcggcggcgaaagcattcatcttcgcggccttaaactctttatcgccaataagaaatgtggttaattccattgccattaatccccaataaaaaaccgcccgtaggcggcctatttaaacgttgttcccacccagcgagaacttaagatctgcacactcaaaggtgtaaatacgctcgccaacttcatttgttgagaaagccacatcaccaagttggtatagccaagcctgacctgcagcaataacggttcgaccagagaagtcggttaccgaaactgggtaaacggctttgccatcatcagtcagcgagtcaagattcatcagtgctgagatttcatcgttagcaattgaagtttgcagaaggtgtaattcaatctggcctcgcttatcagttacgcgtgcgcgaccaacagatccatccaatcccgcttttgactcatagaagtttgcatttttacgagctgtgatagagtcaccatcactaaaccctgtaagcagtagcggcccgatagtgacaaacacttcagagccgtcataagtgccagttaattcagcagacataattagccctcatagctgtaagtcagtgatccgttaatctcgaccagttgaattgcgccagctaaaagcgccacgaactcaatgtatagagtgcgtgttgctttaatatctgctgacacatcagccgcgtttggataggtgattttaaatcctggcactgtatttccatcagcatcccgctcatcaggtgcaataccgccagcctgttgcccctgaataagcgaaccgttcaggttattcacgatcagcgcaattccgccgttggtataagggacttttttctggcgtatcatcagcgacgccatattcttctgaatgttgtctaccaaccagtcacggaaacgaaccatatcaatccactcaccagaagcaaccttccctttgttaattaggaaggtattttccgcatatttctcatacgcgttagcattcttttggaatacatagctctgttcggtatcgctgaatttacttggtgtgattgcggataaagtttttagcgcccatgtttcgccacccggagcgatagtaaagcaacgccccatccatgccatttctggatattctgttgctgcggccttgtgagcgatcaagctagtgcgaagatattgcagttcttgcagttgagatgcgatatctgcatcaccagaagcccaaatgccagcggtgtcactacatgcgaagaacagctttgtttgagtctctgcccatgccgccgctgcactgatgaggtcatcgcctcgctctactaatgcaaatccataccaacctgaatcatcttgctggatagcattaagatcagccgccaatccatcatcagagccagaggatgagatgctcaagttagtgaccggcttaatgacagtagccgtgtctggcgccttgattgtcaaacttagtccatcagcgctagccgttgcagtaaacagctcagcaataacagattgcgcggtaagggctgtgttcagaccggtataaacatcctccgcgtcatcaccgctagccgcggtataggtgatatcagttccgtttacactaaacgtaaagatattccctgccacaatagatgggatggttaccgttaggtttactaacacagcatttctacggccaacccatgcctgatttggtcttggtgtttggctaaagactgcagaaagcgccttgagcgtttgaggatctaaaccatcttgttgcgctgcgttatagcttgaatatttacgtacccgctcactaaaagccgttgtaggcgatactgcgagcggaataccgaatgacgccttagcgatactcgctgtatccagcgaaataaccacattggcgatttggctcaaatctgccatttgataactccgtattgattagtcggatgtgacggcgagagtgatgtgtgtttctatgccgccgatgtcgccattcgcatcaacggtttcaataaggccaacgtcatccagatatttgcctgtataacgaaatgttaaatctacgtttgccatagcctcgaagtttgcttcatcgcgtaggcctgtcaggtcattaacctgcgcattgttgctaataacgaagcgttctttacgcatgagataacggcttgtcgtctttctgatgttattcaccagatcgtcgcaatgctctctagcgctgccgccgtaaacgttcaccatcaccgccccctctcgaacgccgtgtgaaggcataacgccgccatcattaacctcgccatgctcatctcttccgaccgtaagtcgtgtggatactcgcaacgtggcatagggtagcggtaagcgtgagttattctgattggcgtaagcaatggggattgaaattaactgagatagaacacggtaggcggcagattcaacagcatcaggaacaaattttgataccgtggtttcagccatcgcgcttccttactacataatatttgtagtgtggaataataccgttctgccatggttctcgatgcttaacctcgtagttaaatccatcaatcaccacaattgctggctgggccatgtcgaaatcgtctgtgatctgcaacttggtatcgctgtatagcctgcgataatcagttagcctacgcccagcctctaaactctcaatctcctgcgtgtctttgatgctttgcacactgaaataggcttgagaatccaccatctcaccatcaacaagaacaccgttaaccagcgtagatgtagcaggggtaagcactttgtaaggtctgcggaatgggttactcatttcgatttaccgtaaggatgaatggcgaaagtaactgagttgatcatagctctatcgtccaaaagaggagctgagccatttttatgagcaagggtatactcggagttgggaacccaatccccatgagtgatactatttcttactccattcaccatttctacacctgctgcatttagaaattgcatgaacgtggcctttccgagcaatacctgagtaatgccattcactgagaatttctcaagtcgtgatactgaattgtcaaaataggttcgcatgaatgggcgtgatgggatctttctggttccgaactcattccatgtagcgtaatcggcaacaagaactccgtcattcacctcccccttctgaatgcccgttactacctctttgcttccagtcgctttaagctcttgcttgaggttatcccaaagccttttgttatccgttatctttacggacacaagcaacctcctactattcctctcgtcataatagaaaaaccagcccccatgcgtttacgaagcaactgaagcaggtttccatatgtggtgccgctgaggtaactagaatcgctggaaacattgccataggtgatagacaaatcaccctctttgcgtgacaaaaccttaccagatgaagatgatccatcctgagaatatccgcccggcgatgccatgatatgtgccgccataagtgctagtgcaacgttataggcttttccatattcatcaacacacacataaaacgtagaaaaatcgatatacccctgaaccacttcatcgggaacagccgcaaattcaggcgcaagcttgcggaagatttccagaggcgtcatgccttcaaatgcggcgatgttcattactttttgtccttctctttcttatccacggcggtagcggttacttcttcgtcttttcccgcaatgcgtagttcgcctttggtgattgatgcctgaactgttttattgtccttccatttatcatcaatctctgcggtttgacccggtgctagtttctgtccagcgatgtaataaagacgtgcggatgagttagtgaccttcattgttaatccttaaagaaaagaggccgaagcctcttaaatgcctttgatgaggtgtagtgtcagcggcaggtagacctgtacgccagtagcgcggctatggcatgggattttgattgccaagttattagcctgtggaggtaattgctcgaacggctgcggaatctccatggaggcgttgtcagcgttacgctccatcaccaatgccgctttagtgcctgctccgtcaatgtcttccaattcgtttacacggatccactgcataccaggatattgggtattgaagtaggtcatgtaagacgtgttggtgttaggcatcggctttgatagtactttgaacttgcttggaggaagcccaattacgtttgcaccatgcaagcctttggtgatggtttcgatagcagacactgcatcttccaattcacctgacgcaatttcaccagttgtccagccagcagaggtagttactggaatgtttggatggtcaagcacaccgacaatctgataggcgtcatcaccgaagaatgccaactcattaactttaacgtcatgagctcgtcgggcggcgttggccagtcgagttggcagatttttgccagttgcctgtgatgcgcggatctccatcaggtcgtattcgtagaagttaccaaggctaaatacctttcctgtttcttcgcgatagttaacacctacgtttggcaaatcatccgaatagtcggcgatgattcgcgccataccggttgcgtccattacaccgtaagtgaatgttttggcgtatgcagggatttcagaggtcacagggaaaagcgtggttgctgtcagagcagggtattcgacttcgtaaaccttagatttaacgtagtccaactcacgagctatgaagattgattccccttcgtcaagtcgcagtccattagccgctgcacttagctcaatagcatgcaagtcaacttcatcgtaattcatctgttccattatcgttccttattctgaggctgctggttgtgtcgcttgattgcggatctgaacttcagccagatggatagtttcaccagcgctatttttgtaattggtgaatcggcctgtgaacttccagccaagcgccagagagccaccagttgccgccactttccccacatcagctccagaggtaagcacatttacatccgcccccatagttggcgcggcggttaagctggtaaccgcccagattcgcccccatgtcattacgtttacggcatcgccattttcgtactgaccagtaacgcagccgtattggctgaatcggcagatacccatcaggtttgctgcgtcgcccgcggctgatacctgcttgactacacgcttgtcattagctactgatacccgagctacaacataaccgggcttaatagcgccttgggcagcattacaaccatcggtaatttgatgagttgcatctgaacgcatccccggcatagcgatctgcatgttgttatcgtatgaggtttgaacggccattatttagcctcctttttgccatgaaggcgatcgagatacttttggcgggctgcggcagaacctttcagttcagatgcatcatcgcgggtttccgctttatcctgattgacgattttgcgctgctgctccataggggctgactcaatcgccatatcgaacgcgacgttgatgtaggtatcgtctttaccgtctagcttgatggatggcttcagcttggctacaaccgccttcttgacggaaatgtcatccagcccatcgcacttgataccgtgcttctctgctttagcttccagttcggcgcgagctttaatagttactgccgcatcttctcgagcctgcttaagtttcgtttcaaactcagccgcatcagccttgagggtgtcacgctctgcggtgatggttgagattgtggtattagcctcatcaagctttgtctgcttgtcagcggcatcctgtttcagcgccagatatgcaacaaccacttctggggctgcttcatattcaaggccgctgtctaagcggatcttctgcattgttttaccttttggttggttgtcgtcatcatctaaggcgatttcttcatcaccatcgagattcagtgttgccacgtctccggcgcgagcctttgagacaagagccaaatgattgatacggatgtttctctgcacggcgtcataacgctgtccattccattcaccaggtgtttcatcgaggtctaagcggtagccaagcgataattgcttagtctttccgctggtcgctgatgtaatggcgttttcgtcatacaccatgattggcacaacaacgttttcaccatcctgtctggctggttccagcatggtgccgaccatatgctttttggcattttttgagttgactgctccggggtgaccgatagtgattggttttcctttgaagcttgccagtgagtcagcgttaaacacttcctccggtgggcgaaactcgcgacgttctgatccgtctggattgcggtaaatctggataccaacacgccccactacaggtgtgtcctcaaggtatccgtcctcatttacagacgcgcggagttctcccacatcaaagcgagatactgtcttcattgattgccttatttattcgccgatatcgaaaaccgagccagaccaatcaggttcggcataacagcggcagcggattggctgcccggggtgtccatcagatggtgggcttgaccacttaaagcgcttcccttcccgatcaacatgaatttgcctttcacgattatcgagaacgccacgccagatataaccatctattccagcgtctgcctgtctctgctttgttagtgcagagttggccttaccaatctgatcaaccgcgataagctttgctcgcctttcagtgacgccgtagcgctcctgaatctgcttttttatggtgtcagcactggagccgttcatcacgcctcgttgaatgatgccttccatgtctgatagctcatcagtaggaatagatttaatcaggcgcgtgttttccgatacccatagctcttgcatttggcgcagccaaggctctgctctataggcgtccacaccgagtaccccagatgaagtgggtacggttgtttgacctgcgataatggcttgtgatgtgggtagctctaccccagtgccaccctttacgattaaacgccattgcttatcgttgaactggctggttagtgagaagaaggatggaagcctttcaatgactggttggaatatccggttacctgcattgcgcagataagccaaaatagccgccatatcgtcctgccacccatcaaaacggatgtcaccatatgatgagtcgatttctttgttgaattgccgtgtagcctttaccaaagcgtttgtgtagtcacgctcaataccgtaaggatgaagccatactctagccatcattcatctccggatagacgtacccaccgcgttttttgagggtggcaataccttcatcattactaacccagccaagttgagcgtaacgctcgtcggcctgtgaccattgattggctgtttctgctcgctctttgtcggtcggcacagatagagggttaaacttgatagtccacgttttatctgtcgtgaggaaggtaacggctttctcaatagctggtcgtgcttcatctttttgcttgcggccaactaattgcttccatgactcaggcacagtggttttgtcagctccttgcccagttggtgtcttggtaaaaagtatttgctcatcaataccagttaatgcagagatacgtagttgctttcgatcctgaacatcaactacaccagataagtcgccattcaacagctcatacttctcagtattagcatcaacgccgatggtattcccgttactgcgggtcatatccaccatgttaagacgtgcctgaacaacgtccctaccttcaccgtctttacacagttcagccaaatcagcagcagaccatacgccttgctgctttctttccagcagacttgttgcatggttatggctcataccgtaatcggtcagtgcatcgtagataccctgtaagcaggatgcgccccatccttggttctggtgacgtatctggtttggcaaccgctcaccgtcgaagatgtggcaccggctggcgtgaacgtagtacggtgtgcctgagatagggttaatctggtactgggtgatttccccgtaagtcatgctttccggatttaggtcgcgcaggaaaggctgaacctgatagcggtcatacacccgaacgaactctaggctgccctcgccaatctctgacgttagctcaccaccatcattcacgccgaacaacatcagcgatccgccatagagacgagcccatgccactgcatcagtgaaatgctgtgtcagatttaactcatcccacctagacatgatctccggttcgttgttggcaccttcaatggtaaatccggcacgaaacatctcatcggcaaccaaatcgacaatgcgacgacccagcccatcaccgagatagatattgtctaatgtcgttctagttagcagatgtgcgaaacggatccggctgtatgccgatctgtcaccaccagtaccaatgttcatgaacacattttgataactgtcagtgcgtgattgtttatcaagtttcttttgctgtctgttgctacgtttagccattgcctcac

SEQ ID NO: 8 - DNA, 86185 bp, bacteriophage
aaatgcctgtgcaatcaggatgggtaggttcctccgctgttactgagaccggacaacgttggatgagtgcagctagaaccacacttagattaagtgctgccggatggatgagtgaaatggtagggaaatctaaggaatatgttatcaatgttggagcgagtgataactatgatagggatgcacttgtaaatgctatgagaacagcttgtggtggcaactggtcaggggctgcctttagaattaacgtttcaggaagaataacatgtcctgctaataaagcctctgtgttctggtttggtggggatatgacagcagtttcatacgtacatattgtgaacaatggatggattgctggtagaggtggttacggtaaacgttcagatgaaagggctggtgatggtaaacatgctattgagaactacattgggactaaattaagaattgaaaacaatggtatcatcgcaggtggcggtggcggtggtggtggtgcaacaaacgcatctggtggtggtggtggtagaccacttggtgcaggtactactaacgctcaaagggcaaacggtgctgctggtacttgggatgcaggtggtgcaggtggtaggtatggtacttcactagctggtaatggtggtgacttcggtgcgaatggtggtaaagcctctgtaggtagtggtggtgtagctggtgctgctggtaacgctggttatgcaatctatggacaagcccctacttacattaaagctggtgatattcgtggtagaaaaccttaatagatttttagataggagttagtatggcgataggttcagggtgggtgggttcgtctgctgtatcagagactggtcagaggtggatgagtgctgctcgtactacagtacgtttgagtgcatcaggttggatgagcgagttaattggaaaatctaaagcagatgctattatgacggttgggaaatacacaaacggtgctcttacggcacttggttatatcgcaggtggtcaaacagctacagggtctttaactggtacaattggtggatacagagtagacaacttgtcaacagcaacacttggtggtcaataccctgctgcaacaatggttctttcaactatgcctaataagaattgggtattaaacattgatgggactaacttcacattcactccaacatttagcagtggaaaactttatcagtatgactgcacaaatcctactggtttaatcaacttactaaacccaagggtaggtaaacaaattccaattcttgtggttagttaaaaatggggtctgtaaagacccttttcttttgttctttcaaagaggactaacaaatgccttttctgattactctgttaaagacaatcttaatcaactttggagtaaacctagtagtggcattgtttagtgataacactctagagtttatgttctttaaacttgctagatatctagcttcaaaaactgagacccctattgatgatgaatttgttgataccctctacaacagtttttatcaaaataaggggagtgtaaatcctaaagaggtaggtaaatgaaatggttccaagatgttttaaaagataacgtcgcagttttgattgcaacatttgtatcacttgttgtttcatgggctaacctgaacaatcaaattggggatttgaataaacaagttgaacaaatgcaagcgtacagcaataaagactatggaaacatcaaggatgtacaaaaggatgtgaacttacttaaacaggattttgctcaacagcaagcttatattgattctctgagaagagattctgaaaagaccaactctaacttggataagcttactgattctattaaccgacttacagcagtggttagtgctctggaagttaaagcagaaatcaaaaaatgatttcagtttgagaagacccctttattggggtctctctaaaaggttatttagaaacaatcaatggggctttaatcacacctgcattattatagattgggaagaattttccaaaatctacagcagtaagcttttcaagttcttccaaggtctcgaaagagtctggaagtattagtttaggggcatcataatgctcattattgattaaacgctccatctgttcagtgtggtctttgtagatttgtacgttaccaaacattgctgtcaaataacgtggtttataccctgtcaaacgtcctagaatgtgcatcaggaggccatatgaagctaggttatagggttcccctaagaacaagtctacagaccgttgatagaattttaaatcaagccactgaccatcatctatatcaacttggaacatcatatgacaaggtggtaacgccataagaccttgtgcaatatctgctgggttccatgcttgaacgatgtgataacgactgtacgggtctcgtttaataccttctactaaacgtttaatctggtctacaggttcaccactaaatcctacagaactacgccactgaacaccatagatacgacccccacactcagaagcctcttccatacctctttcaagattccaacgtttaaaatcatcatcccaaatagttctttgtccttcatctacaccaaatgttttgtaacgtagacttgacaaatcatcacatccagccaagaaccatagcaactctccacaaacacctttcataaacacttgtttagaagtcagtatagaaaaaccattacgcatgtcgtaaaagatgttaggagtgttaaaagaacatctaacctcacctgtacgggtatctcttacagaaccatgtttctgaatgaacttagcaatctgtttgtaacgaacatctaacatactcatctttgcaatcccctttaaattactttgtataggctgttactttaccggaaccatcaggcagataacggaagaaagcagcattaaggttttctgtgatgtgagacaattcatgaccattaatagttacctcatcaaaagatgctttatcactgtaatctccaaagatttctgtatgataaacttcatcaaaaacatgagcaagctgaattaacagtgattttccaccaatcacaaagatagtattagtggttcctctgcggtcactgttagtacatacattctcaggactctccaaccaacgtacagcagcttctaaactgtatggtttgatgaaaatcacacattcaccgtctacttcaaccatcttcatttcaccagtggtgagacccaagccagttgtgacaaccacattaacacggtctgttaaaggtttttcaccaatagactgccaagtattgtaacccataacaacaattgtgttcatggtcatattcttaaaatacaacatatcctctttattcttaggccaaggtagtttacttcctacaccaaaagtacctacagaatcagttgcaaagatagctttaatagtcattttcttaatcccctttattgttgtacatttttaagaaagctttgcgttccagaagattttcaatactcttcccatttcttttacgccattcaatttgaaggtcaatcagcgctaaagttccttctaaggtagttttgtagtaccatccagaatcatcttgagcaacctgaactatccagtgacggtcaagacacttcataacacgttctgacaaatctgaatgagaaggttccacaatagatacatgaagacctttctcaccatctgcaaagtataaaaccttttccatcgtgtatttaagcattgtaatcacctaatcagagttgtgtaatagttcttttgtgaaggtcaatttcaagagtgtggaaaacctcacccaacttatcccactttagagttttaattttcttagactcattctcaatgtctgttgcgtggtctgtaaagaacttattcaagaaactataagcagatgcagctttcttattacctgtagcaagggcacctttagtccttgcatcaaagacttttctacgccatgcactataaaactgtgacaagtttccaatctgcaaacccgccaaaacctcttcaatacgctctacgtagttattcttcttagccacttcatagattgctaccatatcttttgggtagttgtaatgtgagactcctttacgcgctgtacctatgtcgcaataaatctctgatacaaccatcccactcaaacgctctacaatacaatacttcatgatttatccccatatgttgtttcagtctctaaataatagttcttcaaaggggtcttttcaatagcttgccagacccctttacaaaaccttacttagaacaggatatttaggtcttcacgactgaatgcaaaagtttttgccttacccaatccttcaacctctgcatctaacatcacagtatcaacaccttcaatctcttcatgaatagtgctaatcaaacgtgccttaacaacactgttagaaccagtcataagcttcttgttagagatagccgaacccaactgttgataacctttcttgcgtgtacctgtgaagcttgggatagcatctcccttagcaatcaacttatcaagaagactttcaccaatcaacttttctgtttgtgtaggtttcccatagaagcacagtacataggttactttgttgtgggtttttgaaattacattatctaactgcattttatttctccttacttgttactcataatcacgaattgctacaccacgtgggaactctaaagacccatcaggagtccaatcttggaatttaactgttaatagttttcctttgtacttactctcaaagttaactacaaagtcttttttaacatcttgtgggacgttacagtcaacaggtaaagttgtaccattcggtaacataaccacaagctgtcccaaaccacgtttatcaagctgtaaaccaacgatagggaattcagcatctttaaaaatcttccatttctgtaagtcaaaagagcgttcaccaaattcatacacgcctttatggtttcgcagcataataccttcgtaaccgtctttcaagaattgcatgtgtgctttgcgagcatcttcttcatccttcaaaagaggaaccattggtacaatttggatacgctcatatccagaagatgttactgtgtcaagtaactccccataaagcatactactgcgctgactccaatccaatgttctgtccatagggaggaagtcaaatacggatagaataagttcattacgttgttccttcttagaattcttcaccaagctgttaatatctttgagatgcattccatgtatgtacatctcaccatcaatagagtgaacatcctttttcaccttcttgcataggtcattaatctccttattcatcaaatctggaatttggtaaatcttacctttccgtgaaaaagagataaccttactttcttgaccatacatcttagtacggactccatcaagcttacgttgagcatcacatttaccatactcaaccttttcagagttcttaccgtccgtataatcttttgcaagcatcacgtcccaagattcgtaccccatagccttttcacgactatcttggtagcgttctttatccatcttagcctttagacgtgaatttaattcaaagacaccttgagagaaagggtctctttcattcttcttcccaacgtttgttggttctgcctgataagactcttcaacgtgattactggaaccatctacaccagaaaacatatggacaacaccactgttttcaacatagccataccatacacgcagttttccttttttgtctcttttaaatacagggtctactttatacattgtcaaagcctctaccaattcatttcaaagtcaaggttagcattatcagcaataggattccagcctaaaataaccccatcagggaacatcttcatataagctggtaaatcatctatatcagtaaccgatacattctcatccttgacaataccccaacctgatttaccaaaatgaagccaagtgttgataagatactgtttaatatcttcttcatagccgataaagatacacacaggtttatcatcattatcctttacagtgataacctttgcattcatttggtcataatctttccagagttttttcatattatttacctgcatcttccatagcgtctgctaaggcaaaatgataccaagcacgtccgcctgaatcacaatcatggtctttgtcaataccatacttagttccctctgcgaagtcatgtaggtagtgacgaccttcaccacgtgttaaaacatctacatcgctctgtgtaaggttacgtcgaactaactgacaacctccatagaaagcctgtgaacggtataacatctctttaccgtactctgaggtctctttagtcacgttagcttcactatcaggcatccagatagaatttgctaatttctctgcactattgaattcttctgattttccaccgataactgacccaacatctacaccaacatctttcaaagtctcattgactgtagacgctgaattaagagcacccatgacagcagtcatagtagcatttgccatagcagaaccagtcaaagccattgttaaaccaactgctaaaactaactttttcatttctttcccctccgtttttagatgagtgtattctaaaattcagaatttaaccttgcaagtgtctttacacttatttacaaatcttctaatccagccataatgaccagaagtgcaattacacctaagattattgctagtatttgcatgttaacctctcttcttaatttttgtctcataaagtaatgttataactatcaataccacaagtaagagaatgcctaaaaaggtctcactaaagaaaattgcacaaatcattgcttacgcttccctaacttaccttctgcaacaagctttttaccatgttcaatctttgcatcatgtttagcaaaaatgtctttcagttcttttacaaatctcttatcagatgttctatctagtgtacctgataagtattcatcaagagcgtcttccacggtaactttcttttgagcataagactcaaagactattgcaccagtttcagggtctacaagtgtacccttccaacaatcgttttgaatccttgaaagtgtcttaatcatatttacctccaaatgaagggagtgctgtaaacacccccattgaatgttacccttctacgtcttcctcttctggattactagcttgatgttgaacagctttggtaatcaagtaagcgactgcaaaagcacctatagctacaagtaactctaaaagtatctcaatcataataagcacctcaaattgtgtaaatcttacactattaagatacctaagatgagagtatttgtaaagtatctatgacatttggttataaacactttgtgctttgcatcataaaagaaaaggctgacctaagccagcctctttacaattacttaattagtgtactgccaaccaactttcaccagcttttgcttcaccagttactaatgtttttggtttcagacccaagttcttagaagcctctccatagtgccaagacattgcatctttaactgcaccaataatatcgtttggagactccattgaagcttcatcgtgaatacaagccaataaacgagcaccagtgcaaggtttacgcccattcagaaccatgtaaccttcttccaaaagacgacgacataataagttaacagcttcattctgtacctgtgcttctgaccccatcaggaggtaatttagaagtttgtgtggggatttaacccaaacataagcaccagcaacatgtacaaacccaccttttgagataggatgagatttaccaaattcttcttccaaggctttcttgtacatcttgaaatcttcttccaagcggtcaatcaaacgtttaatttttggaagtttggtgaagtatgtttgcttaaccattgcaccttcttccttactcttcatcttgattgtcagagcaaacttatcatcacctgcaccaaacagcaatgcatagataccattcttagctttcttacgtccaccagaaatcttgtgatgcaactcactatcttgggtgacacgacattccaaaatatcttcttcttcattcaaaccgaagtagatactattcatagtatgagcatcagtaccagtatagacgatatatacatcgtttgcttcatcatagtcaagatacttatcaactttagggtcaaggtacttgtcaaggtctttacagtaataacgtccgtcctcttgacgtgagaactgaacctcttctttaccctctttaaccgctttcgtaaaatcatcatcacccatgaagttagccaacaaaaccaactgagcagagttcatatccgttgaaactacagaacaaccgtgttcagcaatccaaacttcacgcattggttcaccaaacaccgcagcaccagacggtacgttaacaattccacgttgggtcatacgcccagttgaagtaccaaatactgtggcacctgctgacatacgcccatcttccctgaccatgttaagccaacctttctcatcatctttcgcattttccattgtacgacgacgatgcatcaaagtgttgtaacgtgcaatcttctgtccaatttcaccttcaatcgaatcatacgaagattctgttagttttggtgaagttctcaacaaagaaccctcaacttctggaagcgttcttttcagaccccaatcataaacatagtaagttttacctttatgttcaaacttctgcaaaccaagttcttctaaacgtttacgattctccttgttaggatgtaagaagcgttttgtatctttaaagcgacaaaccttcataggtttaccatcagagtctttcttgtagttgtattcagttggcttccaacctactgtgaacaaatacttatgaacttgtgctgtctgactcatcttagcatcttcaaagatgattggagtgtaaggagcagcaataatagtgtcttctgtaaccatgtttgaatctaattcaaagtgattcaccacattgttcttcaaaagtaacatcataactgtcttcttaacaggcttccagtaagtaaccttttgagatttcttagtaacaccctcattaagtttctcattcaactctttacacaactctctggcttctgccaacttatcagttatcttcttataaacctcaccagtgacttgatgaactagttgataggtcaccttttcagtttgtgtaaaagggtttgcgacatgttttgctaaaggtttgactggatataacttagtctcaccattacgctgatgctctacatacttagtcttaggccaccgtgtaactttcttataagaatcatccattgaaagttcaacatactcattccactcttttgcaaaatcttcaacagtctgtgtaccacgattcttaatcactttaggtagatgtggttctacctcttctgcaatcttaatagtttcaatatctaactgtttaacgtattcacggcatttttcttgttcaagtttccaaccattaatctcttgaactgtcaaccaaaattgagcttgtttagtacgtttataagtatcccaagtatcaacaccacaacgttttaacttgttatactcaatattcaactgacgtttagctcgacggttgattttgatatcttcaacgacacggttaagaatttttgcgttccaaacaccccactcttcaatctctggtttaggaataccacagcgagcaccccatgcagccaaaccatgagtaccacgataaccacgtggtgtaggacggtcataccactgaacacgactctgaacaagggaatcaccccacttatcatcccaaggttttactgtgttgatgttgaacaaatcgggagcaatctcgttaaaaacccaatagtcataaccgaagaagttgtgaatccacacttcgtcacagttatttaacatgaattcaacaccctcacgaagtccacctttaatgaactttgtttcaggcacaccaagaataggttcatctgtgaaaacccatatatgattctctacttcttcttctggaacggtgtagtcacagaaagccattacgtggcattttgaaaattgtagtaatagaccatctgtttcggagtcacctacaactctgtatttctttttaatttctgccatttctcttcctccttatgaaacaatgtagtgatagtacccctttgaagaagtttttgcaatacccttgacagaacttgacaagaggtttaatgttgctacatggggttttctaaatagggttcttagaagattctttaaagataactgtacagttgttctaggtagatttctataagaatcttttaaaagaacttttaaatagtcttgttaaaggttctaaatagattctttaccctatttaatatctaacaaacgtaaccaataaaagaataatctcataagaagcactgttacaaacctgacaatactgtgacagataccttaaaaaattttccaaatggtgttgacacagattcttcaaagttttatagtgctcaccgtcaagacggaacagattaaccatcttgacaatttctaaatagataacacttgtaagaggaaacataatatgaacaccaacacttctatgaaaactctcttgtcagtaactaaaactggtgctgctatcaaggggaaagtctttaccacaattgaaccagctatgacaatggctactctccaagcatggattatgcacttaggtatgtccaaggactctccattgagttctgttcttgaaccagtaattgattctctgccatttgaaaaaccagagaatgcattcgattatgtaacaggcattaacagagctttccgtaaagatgatttcaaactaactgctatgggattgatgcttgtctctgaacaaattgtacgtgcagcaattactctgtacacttcttcttttgcaacaccactgacagaagagaagattgatacgttggttcgaacctttggggatgatgctgacacaatgttctatgtagcacttctcaacttgactgctacccaagctatctatcgaatggcagaggactcttcgattgatattactcgtcagtatgaccgagattatttctttgagaagtcttacactttggtggatgatatcttgtcagtaatggatgaaggtggaatcaactttgaaaaagttcttgaccctgtacttggttcaatccacattttgattgcttttgtaatgcctatgctggatgcacgttatgagaacatcccactagggcactatgtatcacagatggttgcagatgttgctcaagctgtagaaaagcaggtaatgccaacttatcgttcatgtgcgaagtcttatttggttgaattccttccacaagaagaagcattagaaactattaaaattctggacaatttggtggaagcccacactaagtaaatctgtgtaaacatactgcacaaactttttaaaggggtctattataagaccccgataaagatgagggaaatgatatgcaaaaaattgttataggtttgaatggtatagctcgttctggtaaagatacctctgcaaaattcatgaaagaattctttgaagagaagggtttaaaggttgattcattctactttgcaaaacgtttgaaagatgtggttgattacattttcttgttagatttccgtcacagagatggtgagttgaaagagtcagtagctgctttccacactgatgaaatttctattaagttggcttttagcagtatgcttctacatgacttctacccaaatctcgaagagcgtgatgtagtggttgatagcctctataaacgcttcatagaagttattttgaatgaagcaatacatttcaccaaagctgggactaaaatcactgtggtgacctctccacgtcgattatatcaagtttttggtacagacatagtacgcgaaggtctcatggataacttctggacagaggtggtaaagaaggaaatccttaaaagcgatgcagatgtaatctttgttacagatgttcgttttgacaatgagtgtgagatgttgaagtatgactttaacccgcgtagttttgatgtaaagattgtaaaggttgaacgcccaagccttgtaaacaaggtggcatctcataaatctgagaagggtatttcacaacatttcgttgatacaactttggttaatgactcaacacttgaaaatttagaacttgcatcaacaacactggctggtttactattataacgtgaagtctgactaacgtttgtaaggggtctacacagaccccacttaaaaggggagagattaacaatggctaagaagttgaaagaagctggtacttatattggtcacactggatgccctgaatgtggttcttctgatgcaggttctgtatataaacacgatgatggttcatactcaatgacctgtttctcatgtacaaaagcttatccagaatggaattatgaagaggataaaatggtgacacattacactggtgaaggtgataaaaagaatcgcactttcttgggtcgtgatatggatgctgttaaatcagaactctgtgcaatgagtctgaaagaccgtaaaattccagaatcaactctgaaagactttggtgcattgtgtgatattgatgatgatggtgaggtgtgtgctcattattatccagtttggaagcatgaaaatgaagaggatgatacttcaccaattatccacacaggttaccgtattcgtcataagtttccagatgattataaaaaacctgaactgcgtgggaagatgaaagacttttcaggtggtgttggtgatatctctggtaagctgtgcatgtatggtcagtggatgatgccagaaggtggtggtaaacgtctaattattgtaggtggagaggttgatgcaaaaactggtcactacatgattaagatgagtattgaaaagtctcgtcaaaagaactatttagttgtgtctgtaccatctggtgagaacatccgtgggattaaagataactggaagtggattacatcttttgaagaagttattctagcttttgataatgatgagactggacacaagctgactaaagatgctttgaagattcttcctattgagaaggttcgtatcttccactatccagaaggtgtaaaagaccttaatcagtggtggactgaaaactataaagaccgtaaaaatgtcttggtagattttaaatcacgtatctataatgcagaaagttattgccctgctggtgtaaagaactttgcagatggctttgaagcaatgaagaatcgtggtttggtgcagttgattccattcccatcttcaatgggtgacttgaacgtagctacttatggtggtatgggtttaggggaaatcacaactgtaattgcaccatctagtgttggtaaatctgctttcacacgtgaaatggcatatacagcgtggaatgagacagactatcacattggtataatccctgtggaagacacgtatgaagaattgatggaaatgttctgtgcaatccatctaaacaaacagattaacgagattccttatgatgaacgtgattgggatgagattaagaaagcccacgcagaactgtcagaaggtcgtcgtattcatattgttgaccatcaaggggcaattaacaaagataacttgttagaattcattgattatctggtaaacgtagttggttgcaagctgattatctgtgaccctatcacactggcattgtctggtgcagataccgatgaagaagaagttttgtcagaaatcctacgtcgagttaaacgctacaaatacgctcacgtaaacgtctgtcacgttcgtaagaaccaaggtggtcagaaagctaactcagaaggtggtgacattgcagaagaggatattaagggtactggtgcttacttccagatatctatgaacaacattatccttacacgtaacaaggttgaccctgaccctgttaagaagaacctgacacgcattaaactatctaagtgtcgtcgtcatggtaaatctactggtgttgtggggtatacttggtataatggtgatacaggacgtttggaacgtgcaggtggtcgtggtgatgacatcgacaaggctgctgaaaacattcgtctgacacacaatatggaaataccagtagatgagttctatgaagacgaaggtgaagctatgggactcgttattgatggaaatactggtgaagttctttcataaaaatttttaaaaatttctctaaaaaggtgttgacttcacaatatgacttctgtaaagtacaacaccgttgagagacaacaacgaactaaacaaaatcttaaataggagacataaaaatggctaagactactctgactgcaatgaaaccagtaactgttaaacaagctggtcaagagcgcgaatcaaaacgattccttctgaaaggtgtttggttctactactgtgcaacttctccacgtttaggcgaaggtaagaaattcaacaaacacttccctgcaaaagatagccattacggagttaacgttttactgtcagaccgtagcgttctgaaaactctgaaagataagaaattgggctttggtaaagtaactactgaaactgttgatgctgctgactttgaagataaattcaaatgccagcctccatttgaagctgatgagtatcatttcttgaaactgtctcgtcacgctgcatacggggatggggcaacttgggatgcgattcacactttcccaatttatcagattgaagaagttaacggtaaacgaactgcggttaaggttccatttaagacaatcaaggcagtaccttgtaaagaccacgatgaaaaacgtacttacgatgtaaaatgtcctgatattatgattggtaacggttcattcggtaacattattattcaaggttacttctacgtcttcaaagacgctttgaatactaagccaattcaggaacaaatctttatcgaagacttggttgaatacaaatcttctggtaagaaacctgcaactctggaagatgatgaactggcagccttgggtctggaaggtgttgaagatactcctgacagtgtggttgaagaagcctctgataaaggtaatgatgaacctccattcgacactgatgatgaagaagactttgatgatgagtctgaatcagaagaagaagacgaagaagatgatgaatgggaaaccaactaatcaacttctgaataaataatctgaaaaggcactctacggggtgcctttctttttaggagaatatgaaaatgaactatgtagtccctaaagtaccttcctctgtaaaactcctctatattgactctgacccaattgcttatcacggtgcttgtggtgttgagaaaaccacttacaactttgtgaataaactatctggtgatgagactcaaatgttccccgatgcaagaaccgctaaacactggttgaaagaccaatgtgaggttgctgaaatgctcggtacaagctttgaccccgatgagtgggagcgtatgtcacataaggaagtacgttcagaaggtgaagctattaaggccactaaatccactcttaattcttggttgaaatatgccaaaggtattcccttcaaaggttacttaacagagcgtggtgtcacaaaaacaaaagacgtagaaggtttagaagaccgttatcaaggtaaacgtggaaccattgtgccagtccacttggaagcttgccgtgattatctgttaagttgtcctgagttccatcttctgaaaggtggttttgaggctgatgctgcttgtatatccggtgcagagaagcgtggtaagaaaggtatgctgctatccattgataaggatttacgtcaagcagagggtacttactgcatggatatgacctatctcaagactaagactaaagcccctatgattttctattcaggggatgatggtgtaggtgagatttggcattgccctatcaaatctaaaccaaagttgaagaagctgactggtgtaggtttcaaattcttatgctaccaagcaatggctggtgatacttccgatggttactatggtttgaagggtgttggtcaagaaactgttctaaatctcttagcagattgcagaacacataaagaatgtttggatgcaatgtacaagttctatgcagcacgtggtgatgtgacataccagtcatgggatggtcagactgtcacaaaaactccattagaactcatgcatcaacatctatggttggcttatcaggagcgttctcctagtgatgagtttaattttgataaatatgattggacgatttaacaatgagagttaaaggttttggtaactgtcctgtatatggacattgggtatcactatgtggtgaaatagttccagacaagctacaaggttttgtctacctagttcattgtaaagaaacccataagtggtacattgggaaaaagaatttcttttcagagttgaaaaagaaagttgcagggtcaacacgtcgaaagaagattaagaagccctctggatgggagtcttatgaaacatcttctgactatatccacgatgatattcagatgtttggcaaagataagtttgagttctacattgttcagacgtatgcaacaaaaggtggcttgacatacgcagaagcaaacttacagcacaaattagatgtgatggtaaaaagacttgactctgcaaaccgacttttctacaatgcacaagtcgagaagataagattcatcccaaaagaattttatccagaagcagagcaaacaatacttaaaatcttgaaaaacaaaggaacaaaactatgaaatccctaatcaaaatgcttaaatcacttttcactccaaaacgtacacagactcatcttcaacgtatggaagaggaacttgcaaaaactcatgctgtattctctgtacgtaaagaagaaatccatcaagacattgaagattttggtaaagttatcactgacttaatgaataaacgcctaaacttgatggaagaagaagtcagtattgaagataatttgaaagccattgagaagattcttcatcctgatacagaagaaaaagaagtcttggtagaagactctaaagatatttaatagtttttaagaaggggtcttttacagaccccatttaaaagaggaaacatgaaatgtcagaacgatttgattcatataaagctgttgaattttttaacaaagcttgtgggaataacccaccaaagaaaggttcccctgagtggtatgatattttaaaaaagcaagtatcttatctcattgaagaagtcatggaaattgacaaagccattgatgaagaagaccctttagagattcttgatgggatggcggatgttcagttcgttttggacggtttaatatatctgtcacaaatgaaacaccgtgaagctgtcaagaaagtctgtagcaataatgaccttaaatttactacatcaccaaaagaggcattggattgggctacagatattcgtgagaacaaaggtattaagtgtgtcattgagacaaccgagttagatggggttaaatacttctgcgtaaaacgtcttgaagatggcaaggttatgaaaccttctaacttccctaaagtagatttgaaaccactagttaaagagttctatcaagaacttatggttgttactgcaccaaaatgcatgttgtgtgattcactagaaaaaactcttgacaaggtactcggaattagtgattatacgcgcataaatccgatggagagtgaagctgataaagaattctgcttagataatggttttagtttgggagacattatcttagtagagaacggtgaaatgaaatccattaatttccggtctctcaacagaaaggcttctcaacttgagcaatggttaaaactggtgaactatcatggaatctaaaatcaattacacagtcattgtgaaagacccttcaacagaagacgcttcacaagattttttaacaaaacaagattacaacatctctgcttcaatcatctttaaagaccctctctttaagagaactgatttggagtatgagaatattcttctagcagttttgtacaagtttgggttcgatattgaaaaagatatctctgtaaccccatgtactcacagaaaccattttggtgagattgtatcttgtgatatgtttatgggacgtgaacgtaaagataaacgttggaagaagcttaaatactaccgtcttcacaacaaccgtttaccacatctctatcgttaatcttcaaagggggtctttcgagaccccactaccaaaaaaggggaaaaggtatgaatgaagatatctatgaagacttgttaaatgcagaaacctctcagacagcatatgagagtgtattgcgagaagatggttcattacctgactatcttatctacctcccaagaatgacacagtaccgtgttgtcggatttacaaaagttaaaactgacaatgatgagtgggtagatggtttatcttactttgaaacgatgggtagccgtttcttcacagaccgtaaagacgaacaaaccgttctctatacaagacctttacatttattcactgtaggaaattggtcattcgtgtataattcatctgtaggtgctaaacctagttttgattcacacgattaaggagcttgagatggactatataggtgttggtgacgtggtttacttcgagtcatatacaggcggttctgattactataaactactgaccagaggtactggaatagtatgtaggatagagagtttatcgacaggtggagagttatgcactgttaactatattgataaagatggtaaacctgactctgccacagtctgtatgggtgttcgtaactttgaagcagatacaataagattattaacagatttaataggggattaagaagatgggttacttgacaaaagaagctttaaaaaaggttatcatgaactctaaggggttacttggtaaagataagtttgggaagggtatctaccaaggcgatgcagtaatttactgctcaacggtacgaaatggtggtggaagaagcgagattaaaactggtaaggttttaggtaaacgtggtggaagccttcaagttctagatggtgttgagtatgagatggtaatgctagaaaacgaaaattacgttttcacagagggtattatagcagcaaacgttatagttaccacagaagataaaattgttgaatttgaaaatggaaccctgttttaatttataaggtagaaagaaatgatgattaagcacgttgttaaatctaatggtcaagttgttccatttgaaccagagcgtttaaaccgttggggtgaatgggctgaccgtctaggggttctttggtcagaggttgtattagaagctactaaacgttgtcacgatggttgcactaccagagaactacaccaagcaatgattgacgtttgcattgataaacaatcacaaaattactctgatatggctggaagactcttgataggtttaatctacaaagaagcttttggcggttttactaagattccaaccttggaagacttctacaaaagcatggttgataagggtctttgggaagagatggattactcagatgctgaattgaaggtacttgcaagcttcattgagcactctaaggatttgggttatggttatgcagtattgaaacagttccgtgataaatatggtatcaaagatatccgcactgacaagctgcatgaatcaccgcaattcatgttcttggggatggctatgaaagcctttgagaagcagcctaaagagcggagactggaagatgttaagaagctatacacttacctgtctgacttgaaaataaacgctcctacaccgtatctgaatggtttaagagcacgtaagacagggtatgcttcatgttgtttgattaaagcaaatgatacagctaactctattggtattgctactcatattgcttatgaaatgacaaccaagcaagcaggtattgggatgtttatgaacctgcgttcaattggtgacggtattcgaaatgacactattgaacatatggggaaacttggttattaccgtatggtaaaagacgctgtacaggccaacaagcagaaatcacgtggtggtagtgctaacgtattctatacgatgctagaccctcagattgaagatttactgcgtttgaaacacccaactacagctaccgcaaagcgtattaatgaaatcgactatggtgtcattatgggggatgctttcttagatgctgttaagaacggtctacagtggcctcttgtatcagttaaagatgcaccagaactctatgacatttacattaaaggtactgctcaagaattcattgatgctgtgactgaaagagataaggactttgtaaaacagtgggtagatgcacgtgagttgatgttaatctatgtaaacaaccgtgtagcaactggtcgagtctatccagctttcagtgggaacatgaatagacatacaccatttaaagaacttcttccaatgtcaaatctgtgtatggaagttgtactccctgtgtatggatttgaagaaatgtgttcactgcatagtgataaggaagaccataatccagaagttgatggggaagttgctttatgtttccttgcaagtttagtagctggtagaatctcaaaagaagaatatggagatgttgcttactatgcactcgcaatggttgactctgtaatggatgaaatggattacccattccctgctatgaaacgtactgtacaggcaagacgttcagtgggtattggtttaaccaacgtagcacactacatggcaagcaactatgtgacttactcttcacgtgctggtaaaacgttactacatgaactggcagagatgcattcatactacctgcataaagcttctttacgtttgtctaaagagcgtggtttagcagagtggattgggaagactaagtatgtagatggttgggttccacctcatacagctaataaaatgattgacagtcaacatgacgctaagttacagtttgattgggaagagttatcacgacagattaaagaaaacggtggtattcgcaacagtgtcttagaagcttacatgccaaatgaatcttcttcactggctactaatacaaccaatggtctgtacccgattcgagattttatcttgactaagaaatctgcaactggtaatgtgctgtttatcgtaccagagtatgacaagttgaagtacatgtatgagattgcttggaacattcctaccagagatttgattgattgttatgcaattgttcagaagttcactggtcaggctatttcagcagacttctacatcaactactctaaactggaaggtaataaggtgtctgctaaagagtttatgatggataccttgtatgcttggctgatggggatgaagacacaatactatgtaaacagtatggttggtgttggttcctcttctctacaagaagcatactgtgaaggttgtggtgtttaatactaataaggggtctgaaaagaccccactttaaaaggattatgaaaatgaaaagtaaaaaccctagtaaattgcgtgtggtagtttcacgaaatgtcttcaataacccactatacagcattcaagagaaagtctgtttcttcttctggaaaagttgctatgtggagttgcattcacctaagaaagttcgagaagtattgaaatcttggggtgtaaactataaagatgttaactacgttcaaaagtaaggataagatgatgaagaatcaaaacccaattttcttaggtgacccactccaaatctatgattcaattaactgtcactatcctaaaatatttgaactgtacaaacagcaaaaagcacaagattgggctgaggatgaatttagttttgaacagtctcgtatagactttcagacttgtccagaagcatctagtcaagttatgttgaaaacattgatgtggcaatgggaagcagactcacgtattagtcgaagtcttgtagtggcctttgccccatttatcactaactctgaatatagtgctgcaatcatgaagcagtctgagattgaggttttacatgccttaacctattcagagattatacgtcaatgcttaggagaccctgctcagattcttaaagatgttcttgagaatccacagattgaagcacgttcagaagcattagataaagctttaggtgacttgaaaactgttgggatagagtatcagattcatggtgataacctagtaaaccttgttggtgataaacactacattcgtaaagctatcctaaaaggtctttttgctgtaatggcactagaaggaattgagtttattgcatcttttgcatgtacctttgcattagttaaacaggactggtttgcaggtattgggaatgctgtacagaagattatgcttgatgagattcttcatactaagattgacttagaggttctaaaagagaccttgaaagatgaagattgggaagaagcttttgaactcatcaaaccagagattaaagagattcttgatgaagttgttttgaaagaagaggggtggtcagagtacatcttctcagaaggtcgctctatcttaggactcaacacaccacttttaaaacaatgggtttattataatgcgtacccactgtacaagatgtttgatattgagtttgacttcccaatgcaaacagcagaccctttagtttggatgaaagagtttattgagattgataaacagcaaaatgccaaccaagagcaacaaaacggtggttatttactgaatactgtgaaaaatgatgttgacaaagagccttggattctttaagatacgcatcacaaaagttatgatttttaaggagacaacaccatgtatattatctactctaaaaatggctgccctaaatgcgatgttgcaaagaatatggcaaaggcacgtaacatcccacaccgtgtaaaaatgctggatgtagattacaccattgatgaagtctttgaaatagcgggacaacctattcgacaaatgccttatatcattaatattggtgaggctggaacaattcgacaagtaggttccctagaagacttcatgaaagaagtcaataactaagtaaaaatttgtaaaagaagggggctgaaaagcctcctttttgctataatagacccacgaaataaaactaactaagaggttcaaaaatgaataaggtacgtcttgtcattaagaaaaatgaatcaattgttgagtatgactttaacaagattcgtaatgctgttatgaaagctgctgaacgtgcaaatgtaaaactttatggagagttttgggaaccttttaaagagaaggttgaatcttacttagactctttcccaacaactctacgttctgctggtgatgatgttgtaatgacttatacagtacatgacttacacgtcttagtagaacaggcattaaaagatgtggcaccagatgtttatcgttcatactcacagtacagagactacaaaacaacatttgtaaagactatggatgaactgtttaaaaagactcaagccacactctatttaggtgaccgtgaaaatgccaactttgattctacactggcgtctacaaaaggtagtttaattcgtgggtatctaacaaaagaactttacaaacaattcattctatccaaaagtgaattgcaagctattgaggatggttatatttacatccatgacttacgagatttaatgtttaacactatcaactgttgcctgtttgatatggagacagttttgaaaggtggctttaccatgtcttctattgagtatgttgaacctaaatctgtgttaagtgctttgcaggttattggtgatattactttatcagccactgcacagcagtttggtgggttcaccattccagagattgacaagactcttatcccatatgtaaaacgttcttttaaaaaccatattgctgatatggaaaaatacaatattcctatggatggaaactatgcttgggataaagttaaagaagaattgaaacaaggtttccagtctcttgaaatgaaactgaacacagtaccttgttcacgtggtgactatgctttcacaactctaacttttggtaacatggacaacctaagcccatttgataatgccattcagaagatgatttgtgaagctatcttagatgttcgtatgcaaggccaaggtaagaaagcaaaacctgtagtattccctaaactagtttaccttcacagcaagaagaaccatgaagagaatggactacaaagagaattacttgaaaaagccattgagtgcaacactaaggccatgtatccagactacttagacattgaccagcatggggcagttgcagacgcttacaagcgttctggtaaggttatttccccaatgggttgccgagcttacctgtcaccagcttatgatgataatggcgaagagttctatgtaggccgagctaacattggtgctgtttctctgaatcttcctatgatttggatgaaagccaaagaagaaggtaaagagttctttgaagtgttggagcattatcttgaaatgattcgacaaattcatatcaaacgttaccagactttagcagaaacaccagtatcaactaacccattagcattcacgcaaggtggtctatacaaaggcttcaaagacccttctgatgtgattggtgatgagattgtcaggaagtttactgcatcctttggtatcactgctttaaatgaactgcatcaacttgtctttgacaaacctttacatgaaggtgatgataagtttatcagtgaggtgttatcattcattgaaagtagacttaccacttacaaaaaagaagatggttatctatatgctatgtatggtacaccagcagaaagtttgtgtgggactcagttgcaccagttccgtgagaaatatggtgttatcaaaggggtatctgataaagaatactttacaaactctttccacatgcatgttggggcagaactgacacctttcgaaaagcaggataaagaatttgacttcttccatcactgcaatggagggcatattgcatatgtgagactccctaataaggataatgcaaaagctattaaatccgtaatcgagcgtgggatgagtaaaggtttctatcaaggtatcaactttgacctagcaatctgtgaaaactgtggtcaccgtcctgatggggatgttgaaaactgtccagaatgtggaagccatgacattagtgtaataaatcgtgtgtgcgggtatctttcgttctctaagttaaaaggtgatactcgtatgaatgcttcaaaaatggctgaaataaaagatagagtctctatgtaagggggttaatgaattatgagttaatctataataggattatggagagggcacattctgaaaggggtgtacccctctcttattacaaatgtcaaggtaaaggttatgagagacaccatataaaaccacgatgtttaggtggggataaacttgatggaaagaatgttgctctcttgactccaagggaacactacgtagctcataaacttcttgttaaaatgtacccttctaaccataaattgtggtttgcttggcacagactgtctactgatggtttagatagaaaggtttccgcaagagactacgcaaaggttaaagagttaaactcaaaagctttgtcaatcactaataaaggtagagtcttctcagaggaacacagaaggaatcttggaaaatcccaaataggtaatactaaatccaaaggttgtaaacgttctgctgaaaccagaagaagaatgtcagaggctgcaaagaaacccaagaggaaggtgacttgtccacattgtggtttaataggtggtgcaggtaacatgacaagatatcactttgacaattgtaaaagtaaatctatgtaaaattttaaaggctgctcttaacagagtggcctttttcgtttatattgttcaaacattctaaggaggaattatgcgacgatttatctattggtttaaagaagaccttcttctgagagttgtcttcacacttgtttgtttagggatgattgctatagtctacgtaataatagacgacacctttaaggttgcaagatacgtggaagagaaccactgtaggacaactggaagaacaaactctgtaatgttccttatgccagtctttacaggagacactacagtaatggttccacagtttacagtggaaagagagtggtactgttcaaagactgatgagagattttggaggtaattatgttaaagaaaattaaacatatctatcacgtaattttatcagatattttccctcacaaatactatgataaagatggaactccaaagaaatgccctttttgtggaggaaaagatatacagtttatagcaactgactatataaaccacacaattagtgaaggttatgaaagatgcaactgttgcagaaaaggcattatagattgggcttatggcagctataacccataccaactacctacaaagatgagaaagtgaatggaaaactattacattttagtcagtaaaggttcaatagttgggaagagagttgttaaggtttatcatgcaagaaagtatgggaacatgccttacgtgtatctgtctcatggtcagtggggatggatatctttagagatgcttaaagagattggtgaagatttcttaataattaagaaaccatacttcaatggttgcaaagatgttaagaaggttaaagtctttaaagagaagaaaggttggtggaaagatgaactatatgaagattgacccatgcgatatgaataatggtgatggtataagagtatcactgtttgtagccggatgttcacacggctgtgatgggtgttttaataaagaggcttggaaatataatgcaggagaacccttcacagaggaaacgttggaaaaactattttcatattgtgcagaggaatctatatctggattaacactattaggtggagacccaatgtcgccaaggaatatagatactgtgaccatgatttgtaaagaatttaaaagacggtttccaagtaaagacatttggatgtggacaggctatacttattctcaagtaagtggtacagaggtactgaactatgttgactacctcattgacgggaagtataagaaagacctccctacaaagaaaccttaccgtgggtctgacaaccaagtcagatggaagaaaactggtgaaatacagtttgtaatgattgattaaggattattaagatggctgctaatggttctgcttcactaatgatgatttgtagcgaattggttaatacacaatcttttgaagaaagagcggatttcattgagacatatagaccaaactacgttcgttcagagagtttacgccaatcagaggtctacaaacgtaaacgctatttacacaagcatgtaagacgtcgccatgtgagattagcaacctctttgtttactgtagataacgtctatgagcattttgtttttaaaaacacggtagctgttttaaataaaatgtatggcagagcacactttactataggtcaccacatcccattaggcagaggtggacaccatcataggacaaactggtttatacagttgggtgaagagaaccataggctagggaatgaagtcccaaaacaacgtaataaaattggattcaaatctcaagtgaaatacttgaaagattatataaagaagcatgaaaagaagtaccaaccaagtgttgacttgaaagaagaacttgaatatcatcttgaattattaaaagaagtctactaaggagcatttaaaatgagcacaattaagaaaggtatccgtaatactcgccgtcttcaaatctacagtctgtctgcatttatgatggaagagtatgaagctatcttttgtggaaacggttatcatgatggggagaactttatcccatttgatgaggcagtacgtctttacaacactcacgaaggaactaccccaaaaggtgttggtcttgaaaaagtacacttagtgttgagcaagaaagataagaaaattatctgcaaacagcacttaattaaacttcacccacgtctacgtgagtttattgcagatttgggttcgaaagatgttttctcattcttgaagaaagtcaatcttgcacagtaatcctattaaatgggggtctacaaagacccctttttcatatctaaaaccattctgtaaagagttgtaaagactcttcctatcaagaaccctctcaagtatagtaatcacatcgaaacaaatgacggaaaggaaactaaaatgaaagctacatataaagtatttattcagaactgcgaaggcgaaacctttgaaatcaacgtagaggaagtcacttttccaagtggtgaggtatctattcatttagaagaaggttctctatcagcatgtggaagtatcacacgattccttatcgtaacacgtggttatgaaccagaccaactgtttaaagttgcacttatcaaagatgctttacgtgggatgattttaattgaccaacctttgattattcaaaaccactggactcttgtcctaccatatctaccaaatgctcgttatgaccgtcgaatggtagataatgattcactggcactaaaagtgtatagtgagatgttaaactctttaggttttgatgaagttatttcatatgatgtacacagtgatgtggcacacagttgtatcaacaattttaatcatgttcctgtgtgggaattcatcaaaggacttgacacgcttcataatgtaagcggagaatacactgcacttgtagcacctgataatggttctacaaagaaagttgaaaaggttgctgatgtacttgggctaccaattgtgcaaatgaccaagcgtcgtgaccctgcaactggtaaactgtcagcaccatttgttctacacggattagaacacttgaaaggtggtaaactactaattgtagatgatatctgtgacggtggctatacattcattcaagcaactcaactgttaaaagtatttgatgtagagaaggttggtctgtttgtcacacacggtatcttctcaaaaggtgtagatgcactgtttaatgctggtattgatgaaatctatacaactgattcattacgtatgccagaagagtttgattcacgtattaaaggtatggaacttatcaaagtttaagtaagtttttgtaaaggggtttgcaaagaccccttctaagaattaatatgaacacatcgaaacaaatgatacaaacactaaccactaaataaggaaacttaaaatgactactcaaaatattaactctgtatctatcgacctgtccaagaaagttaaagttctggctaccccaacagcttttgaagatgttgttatgtttgaaacaaacaaggaaggttttggtgcataccttaaactgagcgagtttgttaagactgtcattattctgcaagcaggtgatatggataaagattctatccaagaagtattcacaagtgttgatttgaaagtcttccctctggaagaaatgaaagaagactttaaagaaatcatccaagatgcaaaagataaaggtatctggatgcaagaggtcacctttgatgctttggacttggtagatacctttagcaatatggaagtaggtgagttactgcaagaactgtttgcatagttttgtaaaggggtttgcaaagacccctcattaaagataatctataaatacttgaacaagaccactaaataaggaaacttaaaatgactactccaatttttaatctgaatcgtaaaactaaagtacaagcaatccgtgtcgctgctgataataaatggacagatactttagttatccacgtagtaggagaccgtgtaactggttaccctctgtctcaattggcaatgctacatatgacaagtggtggggatattgaccgaaccattgatgaaatgaatgctttcatgaatgaacgtgttgagagtcttggtatgggtcttgaagaaatcacagtaagtgctcaagaggctgatgaagacgaaacctttaagaaagctgttgagaacggtgaagtaaccgttgaagattacacctttgaagacttcttggtgacaattaccaaaactattttcaacatgtaaggttttgtaaaggggtttgaaaagacccctttgaagaactaacatagagctactaaaacaacgaaaggaagataccatgaatcaatcaatctttaacactcccgcacacttgaactgtgatgcttataaaatcggtcactttttccagtacccaaaaggtcaaacacaactgtttttgaacatgaccccacgctcagattactggtttaaaagcccacttgtagttgatggtgtagttgtttggggcattcaaaacttagtagagcgttatttaaaagaccattgggacaatagcttcttccgacgcgatgaagatgaagttgtagctgaatgggaaatgtacacaggtggtgtgctaggggatgttggttcagaccatatccgtaaactacaccaattaggttatttacctgttgcggttatggcaccaagtgaaggtacagttgtccctattaagactcctataatgcttgtagagagcactcacaaggactttgcatgggtagcttcatacttagaagatgtactctctaatgagctttggaagccttgtacagtggcaactatctcgttacattatcgtcgtcttttggaaatgtttgctcaagaaacttgtgacaattctgaccatgttccatatcaagcacatgactttgctttgcgtggtatgagcggttcaaatgatggtggtacaactaacactggtcacctgctgtactttaaagggactgactcattccctgctgtttataacattcataaactgtatggtggtgaggtatccgacattgcatcctctatccctgcaacagagcatacagtgatgatgagtaacattgctgctgaaactatgggtatgaaaattgaggatgttccaaaatggtgtaaagatgctgctgataatgatgaagatgctttccgttgttatggtgagtatttgtacttgaaacgccttatgacagagatttacccaactggtcttttcagtgctgttatggatacattcaactatttccgtaacttgacagtgattcttccaaaactgaaagaacacatcatggcacgtgatggtaaggttgttgtacgtccagactcaggaaaccctattaatatcatttgtggttataaaacaattgactggtcagatgttgttgaatggtttggtcttccagactactgcacactaagtaacttgccagcttatgtcacagaagaaatcaaggaagaaggttatgaaatggttgttaagcattccttccatgatgtttacacagtcttagaactagatactctggaaatctatgatatgggtgaagaagagttgaaaggttctcttgaacttctgtggaaagtgtttggtggtacaaccaataataaaggttatcgtgtacttgactcacacattggtttaatttatggtgatagtatcactttagaccgtgctgatgaaatcctctcacgaatgaaggaaatgggttttgcaagttctaacgtagtgtttggggttggttctttcacatacaactatatgacacgtgatacttttgggtttgctgttaaggccactgccaccactgttaaaggtgaaaccttgatgttggcgaaacaacctaaaacagataatggtgttaagaaatctgcgaagggttacatcacagcttattacagtgataaagactctacaaagattgttatggaagataaccttgaccgtgaagagtggttggaatctttaaaagatacatactgcatttatcgtctgaaattcttccaaggtgtaacacacactgtgaaaaaagctgatggtagtggattggcaatgactcgtaagtacgctgaaaaattcgtttattaatttcatcatagggggtctgaaaagaccccttttaaaaggaaacttaaagatgcatgtagagaccattatccgtacaaacatctctcttcactatcagtacgaaggtttgtctgacttcatagctttcaagactgctatagataatttaaaagatgttcaccgtgggactaccttctctatcactggtatctttgacggttataatcaagagttgaagctactaactttacaagaacttacaaatgctggtattgatttaagcgaagtagaattctatcattctccttacacaaaacaactaagggttgtttggttcggttaatgaaaaggaaccatcaaataatgatgaaagggggataaagagatgattattcagaacaactatgcagaagtaacccgcagtagttcgagcttggaaacaaatcaagcttctattgaaatgacaccaatgatgtttaagcttcttagcagtggcttgtatcagttcaaagaaagagcagttattcgtgaactgtcttgcaatggtttagatggtcacgaaatgaatggtaaccctgaaaaacctttggatattcacttaccaactcgttttgaaccgtactttgaagttcgtgattatggtatttgtatgacccatgaagagattatgaacctgtatctctgctacggtgcttcaacaaaacgagataataatgacactattggtggttttggtgtaggttctaagtcattcttctctatagctcagtcagcaaccgtgacgtcttggaaagatggtattaaacgccagtatactatttacatggaagagggaatgccacaagtaactaagttaatggaaacagaaagtgatgaaccaacaggtatttctgttcgtgtagctgtacctatgcagatgggtgctaacttcttccatgaagcatgttatgtttatagcttctttgatgttaaacctaatgtaaacatggaattagattacttccacgacaactatgatttggttgtagaaggtgagggttataaggcttacactcacagcagaatgtcaaagagcattgaacctgacgttaaagttgtaatggggcaagtggcctatgacttagatattgacacaatctttaaagaccgtagtgaattgtgggagttgattgatgaatcactctttaaagagttcagtcttgttgagttacatcttcctattggaactgtagaggtagccgcttcacgtgaaaccctttcaatggaagaaagcacacatggttacattgtaaacatctttaaagactttgcttcaagtgttgtgaaggatatccagaagaacgtagataagtgtgattcttacatggcagtggcttcattacgtcaagaacttctacactcttacaagaacaccactgtgtactatcttgataagcatttgacttacaagggtaaaactcttgcagaatggattacccactttgcatatcgttatgcagttttccgtttaaataagcttggacaacgtttccctatgagagattatcgtggggtagaagtcacagataactacggaaatactatctatgcacacgatgtaaaagaccttggtattcgacgctattctgcacaagagttgagagagaagaaaccaattgctgatgtggttaatagaaagactgaactgaccccattctctttttggtggagtgaagaaggttttaaaaagaacatctttgtagtaaatgaccgtagaactaagaaaggaaccatcaagacaactggtaacttgaaaattttaaaagctttgtcagattcttatgcagaagctacgaagtacaatgatgtattcacatgggtattcccaagtgtaaaagatatctacaagtttatcaaaggtttggggattgacttcaacttagtaaaagaccgtatttatttactgtctcaacatgaagacctctatgaacctgttcgtcgtgaagtaaaacctgttaagattggtgttatctctgaaagcatttacattgataaagaaatgtgtatagaggatgttgaaggttcacagttgtatgtcaaagctatcggtaatgatgtagaaagttgtggtattcaacttgtcaatggtagtgtagaagccttagcacgtattcttggaagaaagatttatgtcttcaagaaggctaactggaaaaagattcctgaccattgggtagaattgactgatgagatgattaaggaaaatctgtataaggattcttatcagatgttccgtttaaacatgtacctaacaaagacaaaagtcagtcgtaagatgccctcttatggcagtctggatgggattctaagctggagaggttcttacgtatatgattacctatatcgctctgatagtgattggtatgtccaattagaggacgttaaagatgtgattgagaagtacattggcaagttccactatgtagcattgtcagaccgttgcttcactgattaccacagtgatatctatacagtagttaacaatgtattaacgtctggacacattgctaaagcaaagtacacagctatacgtgggaagctatataagaagattgaaaaagaccttgctaaatttaaggaaagaaacttcttgtacagtttgattgattggagtaaagtacgtttcaaagagttagccttgaaagatggtggtgtagaattccctccaatctctgatgagttaatttctaagatgaatcgctactaagtaagactttgtaaagacagttgaagaaagtctcagaaggtggtctaatgaggccacttaaacaaacgaaaccaaaagaggaaatgaacatgactaagattcaaattgatgcagcaatctatgcagacgttaaagatggtattatgactaaaactgcaattgctaaaaagtacaacacatcaactcgttcagttggtagagcagtggaacgtcatgagaaacgtatggcagagactttcacacaaccagttgtgaaaccagttgtggaaattgatgttcaagaggttgtggaaccagttgtaaaacagactgacaaagaaatcatctacatccgtaaagcatctaatgatgatttaaaagttggtgacacagttatgttgtcagaggatagtctctggcctgtaaaagacagtaacccacgtggtgtaaatggtctggtagcaaacactgatagctttggttggattgcggtagaatgggctaatggcgagttcaattgctataagaagagtgacaacgatttaattttgatagaacgtggtggaaagattgttaaagaacctgatgaagaaccacgtcatgtagccgaagaagataaggttgaagttgaatctccaaaaacttctctgatggatacactgaaaagtggtaaccgtgtagagtatgtgttaacaggtgacagcgttatcttaacaatgggtaatgagacagagattgttgactctactcatccaaactacaaagctattcgagaagcaatctttaaagaggatttcaaagtagcatttgatttgatgaatatccgaaaagctattgagtcttttacacaaggtaacatcacaatcaaaggagataaactattctacggtgaaatgcatgttaagactgaattggctgataaaatcattcagatgatgcagacaggtgatgaaggtttcaaacgtctgattaagttctttgaaaacctgatgaagaatcctagccgtagcagtgtagagcaattgtggggattcgtttgtcataatgatgtagaaattgatgaagatggtttcttgattggttggaaaaaggttcgttctaatggtaatgacttagttgatagtcgaactggcaaggttcctaacaacgtcggttgtgtagttgaaatgccacgttggatggtagacgaccgtcgagaagttacttgttcacaaggtcttcatgttggagcgtgggactatgttcgaagcttctctggtaacgtgattacaaaggttcgtatgaaccctgctgatgtagtgtctgttccagatgattatgatgatatgaaagttcgaacctctaaatacgaagttattggtttggttgatgattatcgtaaagaaatcccaaacacttacgaatacaaacgtcaacatgtaatggttggttctgctggtgaaatcttaggaatcaaagaaatccaataatatttaataacttttacaaaggctgctcttaacagagtggcctttttcgtttatattagttacatgtttttctacaagaggattagaaatgtttttagaagcgatgctcaagacagcctttgcagtaagccttttagtgtcttcacataatgctgaatctccaagtacaaagcttactacaaagactatgcctgaaagttgccctacactaactattaaccagattaaaactttaaatatgtcatacagatatggtgaagataacattggaaaagggtggggcaaggttatggtagggattgctcacagggaatcacaacttggtgttaagttaatcaacagtaagactcaggactatggggtcttccagaaccatcttaaaacagttgtgaaacgtaacaagataaagtttccagcaaaagctaagaagagacttatcaatgacttccattattcagcagatgaatcaaggaaagagatagagttctggaagaaggtacatggtgaaaagaacatcaagaaaattcttgccagttacaatgcaggttacaactataacagcaccaaagggaaaaagtattccaaagacgtgctagatagtgtaaagcttatgcaagcttgttatggtggtttaatgatgtaaggttttgtaaaggggtttgcaaagacccctttgaagaactaacatgtaccacatagagaagataaacaaacaaaggggaaacaatatgatgaaaagttcaacgattaaacctactaacgttgcttatgtgaagtggagtaccaaggaaatcgtaaaaggttacatctactataaagacctttatctagtttctgatgaagaaccagaagtaccaatctataatactccacaagatgattttccagagtacagcattcacgtagatgatttgatgattatgccagatgtacaatacgaaaataaaccaaaagttattgtatgcgacattgatggtgtattgaatacttacaataaagagaaaggtgttctcttgaaagatggaactcatgaaccaaactggacacagttctctaagatgaacgaagtagaacctgttaagtttatgtttgaaatgcttatcagtttcttacgtagtcatggcagagactcacttattatctttatgacagcacgtggtgaaacacaacgttacttgactgaaaaattcttagaagagaacatgggcgagtggtattcaagaaccatcttgtttatgcgtggtcagggttgtaaccgtaaaagtgctgaacaacttaaagtggaacgtatggctggtgcagttctcccatactttgatgtagaagcctttatagatgatactgtagaagttatcaaagctattaatgatttcttcccacacatcactacaatgacagttaaaccaaaagcttaataaggtattgtgaaatgaattttatcaagaaattgttcagttttattgcgtggttattcttttgggtaatgacggttattacagcaggttcccttaaccacttagtaaagactggacagattgacactgatacaccaactgtccttgtcggtgtggtaattttcacagtaatgtattggttaactaaaggtgtagtctttgcagttcattacctaattgacattattgatggtctgtttagaggaagtgtaaaatgaaacgtaaatctatctataaaatagcaatcaacctatggaagcgtcgattccaagcagtgtgtgattcaaaagtgagtccattttggcgaaagaaagacttaaaaggttttgttcgtcaaatgggtgtacataccgcagattggatggtgtatgaagtagctcaagagatagcatatcgtgagtctggatgtaaaggttggtcagttgaattctcaaacttcttcacagaaaacgaagaacactttagagagttagctattgatattatttatcagcaaacgcaagaagaactaacagatgcgctccaagagtcaatggaagcagaaattgaagcaatgtacagctaataaggggataaccatgaaatcagtacatttagtaatgtcagcagagaaagataagaagatggtagaattgtctacaatcctgtatgcagaagcaggacgtggtgtagaattcaaggctaccactgtaaagaaagataatagtgggatgagaagcttcaatgccgtgatggagaataacctcatcaaagcattacgtggtgataacttgactatcacagacacagatatcaatgactaccgtactcttcatcttccaactttagtcagtttggaatttaaagatacaatctatctattcattgatgatattgctatcaataagatgatggagagttataacagtagtgttgtggcattaggtcaatctctaaaacaattgttactgacacaaacaacactggtaaatgcttaccagaatatgttaagttagctttaaagttatggtcaccgaaaggtggcctttcttagtttagtgagaggtgattatgtcaagttatgtaaaggttattgctttaatagctttagtaggggtatcattcagttgtggttacaaactgagagattaccagatagtccaagaaagactccatcaagaacaaattgataaagcttctaaagaggcgttcttacaaggtcagtctgttcttgttgataagatgaatcaatctttgaaagagtttgacagaggtaataaagtaaatgaaaagacaatcattcaagaaaaaactaaaactgtttttaggaatatctgttctactgatgagtatgtcaggatgttcaacgaagcctcagaaaatggtaaatccaaattaccacgtaacacaaagtgataagatttaccaagaagatgtggtagggaagggtgctgttatggaaggtaagacaggtgaagccgtcacagatacagcagagttttacagaaacgagttctaccaatgtgctatcaagtacaatggtttaatagacagaatcttaaaggggaattcaaatggctgatttttgcaagaagtgctctattgaaatgtttggaagtgacactaaagacttagaaggtcttatcacaaaagagcaatgggaagaaggttttgctgctacagttgtctgtgaagggtgctgtgcaggttgggtagaccatgaaggtaatcgtgtaaaaccaagtgaggatggagaatcatgggttcattattaacacctgaattgtatagtttcttaaagtttatagcagtgttgattttcttaggttatgtttatagcaaagattaacagcgtgaggtaactactatgaaactgtttaaaaacgatgatgcatttggttggtcaatggcttttgcagtagcttgtgtcatggtaattttcttatcttctgtttatatcgcagttggagtttaatatgtcaagtacagtgtacaaatggatgttggatgatgttgaagagggtaagttagagggtgtaactgaacttatagaagatgaatccggttggggcatggatatggtctacaacggttggaaaaagatgtgtctacgaattgcagaagaccacggaagacaaccaatattagaacatgactacaacgtttcccctacagatggtagacctaatacacaacacactatgaaggttttggggtcagatatcatcataggtactttggaagtcttctataaataatgttttgtaaaggggtctttatagtagtttgtcagacccctttgaagaactaaacaacaaatgaaaggagaaggaataatggctattacacgattgattcacggtgacttgattgagtttgctaagatgggtgcttttgatttgattggtcatggttgtaatacaatgaatttaatgggttcaggtattgctaaattcattaaagaagagttcccaatggcttttgaagcagaccgtttaatgcatgacaaacataatctacgttatcgtaatacaaaaccacatgtagaatgccctactatggctggtcgtatgtcacatgtttacattaacagtggtggtggattctatgtagcgaatctatacactcaggtttatactggtcgcgatgcaaagtacaaccacttagcagacgctttacacaaccttaatgcattctgtaaagagcatcatgtacaaaaggttgggttacctatgattgggtgcggtatcggtggtttgaatgagttcgctgttctgaacttgattagcagtatcattgaggctgatgtgacaatggttattcatccagactcttacccaagcctttcacactttgagtttaaaactagtctaccaaaagtttatgatggtattctaatgatagatgatgaaggtaacactttccagttgaaccctaatccaaccggttcagagttacccctgataccaattactaaccataagttttgtccagttaccctctcagtaacccccgttaaccgttttgtaggtggttatggtaactttgagaatgctctaaggagttttgatttaccttatgacttcttatacttctttgtcaaacctaaaggagacattcataagctaagacgtctacaaagctttaagaatatccgttgggtggatgttaataaaatctgataagtaactttctgagggcatccctactaagtttttggtaggggtgtctgttcagagattctaacaggggacacgatagaaaattcattttgaaaacgtgcttataaaattaattttgtcaagggaaacgatagaaaaattattttcaaattgtgcttataactagggacacgatagctttttcattttcaaattgtgcttataaaaagaactggcaggggacacgatagaaaattcattttgaaaacgtgcttataaaattttatagagaaccaaccagaccagcaccccaagccccataccaaaatctatatcgaatgtcaacctcctttacaaatctttacaatccttctttacacttctttacaaatctttccttgcatctcatcacaaacaatctcataattcaccacatcaaaacgcagtacacgaaaacagtctaatcaaggaactttaaaaatgaaacgtgaaatcaatgctcttgttaaaccactgactaaaacacagcttaaagcacaaattgataaaggtggatgcattgaaacagtttacaaagaatgtcgtcgttatggtgaaataatctataaagatgattatgaatatacttacactgtgaacttcaaaaccaacgaaaaacaaactgatttagtcactgagatttacattacatataaagatttgtattggcattttgaacttgtcaaaggtgaagttaaaacggcagggtggagcatcaacaaaccagcttgtacaatgtaagaaatagagttttgtaaagatttgtaaagacactagacggggttattaaattgatagataatgaccccatcgaaacgagatacacaacaacctaatcaagaggatttaaaaatgttatcagcaaaaaccttattaaatacagcattgcaatttaacaatcgtactacatctggacttgcacaagttttatggaacatgggaatgttagaagctaaaaaggaaaaacaaccgctttacttttccaataaatcatttaaagttacttcaaaaattaactaatcaaggtttttaaaatgtctaaaaatattcgtatcacggttacttttgaagagatagcaatttgtaaatacaatgatacttgtatatcgctaaacaaacatacccattgtgatttttgggacagtaccgatgagataacagagtacgagataaactataacggtcacattataaaacgagacacaaaagagcaagccgaaaaagactataaagatttatgttatctggttttctcaaaagtaggggcttaaaaatggaacatttaccgactgttgtctacgtggttttctttaataattttcatggggaggatgaatattgcggcgtattctcttccgaagaatctgcaaggctctttatcagccgttctgttgattgggagcaaccgagttttagaattgtagaagaaacacttgatgatttttaatttgtaaagttttgtaaaggggcttgattaagcccttttgaaaaactaacatgtatcacatcgaaaacaacaaaaggaaagagaaaatgaaaaacgtaaacattgattcaactgttattgttagcgtagacgtaaactttaaaaagcttcacaataccgtagcttttaaatacggtgaaaacatgacagctatttaccgtttacaagatatcttaaaagggatgttcctccccttcttattgggtgatattgatgcaatcaatgcagaacttgaagagatggaaccttccaaaccattaacagaggataaggcaaaagaagcctttgaaacaatggaagcaatggcacagttagaaggttcaaaatttaaacatgttgaaactactttacgtgaactgatggaaatgtttttccagcctgataatgaagatttagaaaactttattgaatctcacagttcaactattcattaatagacttttgtaaagttttgtaaaggggtttgcaaagacccctttgaagaactaaacttataaacattgaagagacacaaactaaccaagaggattttaaaatgttgcatctagtcactggtatgatgttcggttttatagcaagtgtgaccacggtagacggagaaacgttcttattaaacgaacaatatcagacccaatcacaatgcattgaagagacagtgagtctagtaatggatttagaaaatgataacgaagttaaaaatgtaaatgttatcatggcttgcgaagaattaacagaagagtaacaaagcgagttttgtaaagaattgtaaagacggtatacaagcaagccaaactaaacaataatacacacaacaaagcgaaacacttaaacaactaaccaagaggattttaaaaatgactaagcaagccaacaatttagaaaaaactttcatcgctatgaatgctttcgatgtcaaaaatagtagtttgtcagtgggtcaacaaatcagtcactttgaagaagctcttgaacttttcagtgttattgattcaccaatcaaaaccattcataaagaaatggttaaagactttccagaacttatggaacatgtcaaagaaggttatatcagaaaaggttcaaaaactgaaaacgtgttcaccgtttacaaacaactcgtaaaatattatggcgttttgtatctaggtttatcaaatagtgctagtgaactgttgtaccaacgtttacgtaaaaataaagcttttagtggtgctgattttagtctggttagtggttggtaaagtggttttgtaaagaagtgtaaagacactagacagttaaaacgaatttagtaataatacacacaacgaaacggggaagactccccaagcaaataacctaatcaagaggatttaaaaatgactatgacttacaattctattcagaaagaaacttttgcaactttagctgaaaatctttgcggtaaacagtacgattcatttgatgattttgaattctacgcagtggatgatttagatgcagaagtccgagaggtgatttactaccatgatgcatgggctataattaacgattcagattttaatggttttgcagaggatgatttagattttagtggttgcaagtcagcacaagaagctgtaatgtatgaagcaaattctatgatgtataacgtagcaagttcaatcctaggcgactttaaggatgatttgtacggtgttattctagcagcaaaagcattttgtgacgaaaaaggttttgaagttaaccgtgtttactgtgagatggggtgcaatttagactctttaccacataactatgagacagaatttaacggttatacttgttgtgtgtgggaagactacaatacctttgcaattgatgttcacggtgcaagaattacagttaactacactaagtaaagatttgtaaagggtgtagctttgtgaaggggactttggtaaagtcccctttgaaaagaaatcccaataaactaaccaaggagaaacgcaaaatgcaaatgttttttaaaacccgtcaagaagcccgtaaccacaaagcaggtaaaattgttgataacggtacaactgctgaaagtggtcgtcgttggggtcgtgaaatctctttaaattgccgtcatttggcagtcgtcaaagtggagactttaaaggggtatgattcaaaacgtcatacattggtgtcttacaaaagagcattcaacgtttgattttgcaaaggggataacttacaatatgatttatgcagtatgcggattagctttattctgtgggttattagcggttaaggtggcgcaactctctaagaaggttcaccaagagcataatgacaatgtaaaagctcaagaggtaaagccgtttttaaagactctaacacaagagcagtttaacaaattgcaagccgctgtaatctttgaaggcgatttttatagtgagttcttagactcattaacagaaaaacaaaagtttaactatcgaattatctgcgtgaatttagggattaaaaactttacaaaagaagagttgaaattaagaactaaataagctagactttaaaacagttaaaacaaacaactaaacaaaaggaaacataaaatgactactacaacttttaacatctttttcaatactgaatcaaaacgcattgtaaatgatggttcaaacattgtcattgatggaaaacgcttcatcatgaaaaacgttatgcaaacatttggtgcttcactgtgtagcgatgaagaaatccgagaagttatggccgatgggattgtgattccagaatcagtatgggaacaaaagttacaaaacatcttacaacgtgatgctcgtttggaactgaaaacattaacacgtgaagaaactaacgaattgattgagttaatgcaacaagataaagacttacctttttaatttatctaagtaaataaccttgaaaagctgcctttatggtggcttttcttttatacgtcttctgaaatacctactccccacatcaaaaccctcctaaaaccccctataaacccctttgcagcgttttaaccattcaacctatacaatcacaccattagacaagataaccccttaaaaggctttatacagcgtttttatagattatcttctctttacacttctttacaaaactattgtagacaaggtttttaatcgtggcataatgaccacatcgaaagggggataccccaaaaacaaacaaacaagccactaatcaagaggatttaaaaaatgactactatcgcaactctgaaaagctacgttgaagaccgtattgtagaagaaatcgaacatgcaagcggagaccgtagcactgttgaagacttaattcatgagatttgtgacaatgcggttcctgtaatgtatagtgaacttgcagaactaatcactgactcagattttaacgatgatattgatgatgtagaatgcgcaggtaacaacatttttaaaatcattcaatggggtgtttacaatcaattaatggcttatgccaatgaaattctagatgataaaattgaagagtgggaagagtcacaagaagaagaagaagaagaaatttaatagggttttgtaaagaagtgtaaagagacttgatagggtcgttctaaaaggtgataatgaccctatcaaaacgagatacataaacaacctaaccaagaggatttaaaaatgtctcacatcacttttgctagcgtatcaaacaaaagaaaccatgctatctatgtacgtttgcaagcctatggttatcaagtagtaagcacatcagatagaaaagggcactatgtacacgttttcgtaaaagataacgaaaaggaaagagtctaccaaataattgaagacaccatcgcagaactaagagaacaagaagaaataatgtaaagttttgtaaaggggcttgattaagcccttttgaaaagctaacataatcacataaagagttaaccactaatcaagaggacttaaaaaatggcttatgtaactgcaaaaggtgacgttactttttacattcgttcaacaggtgaactcgtagaaggtgttcaaaaactcttagattggcagatagctggactatctaaaactgctactggttatggtacaaaaatccctacaagctttatagttaactataaaggccgccagcgtcgtgtttatcaaaatgtttatagcaatgttgcatcaagttacattattgttgataaaattaaggttttcttgtcataacagagttttgtaaagatttgtaaagacacttgcaggggtcatttgaaaaggtgataatgaccctatcgaaacaaagcagtaaacaaaccactaatcaagaggatttaaaaatgactaagaatgaagccatccgtaactttaacgaaatttacgcagaatctgttcatttgaaccctgcccttgctaccgaccttgtagcatatcgttgcggattcattgactacgttgattcactttacagtaacggtgaaatcactgcgaatcagtatgacaaatgggctgtgacaattgaaactgtaaacggtctaaaaagaaaattctctaaattcatctaacaagattctgtaaagttttgtaaaggggattaaaaagacttgattaatcccctttgaagaactactatagagtcattgaaaagcagtacacaaatacaacttagtgataaaagccttaatcaaaaggaaccaattaaaatgactactaacatttcaaaaactcctttcagcattatgaccaatatccaacgtttaaccatgaaaatggaaaagaacgtttggatgtacttagaaaaggtcaattccaaaaatgtcatgatttacatcgaaaagactgaaaacgggtacaaagtcgcagaacttgattcagaacgtgttttcggtgtaggtaaaaacttcatgcaatctcttgcaattatctataaagaagtagtaaagttattggcaaataatgaaagtgaagcccctatgaaagaagtagtaactatacagcatgttttagaagaagctttaaaagaagctactcaggaaaaggactcagggaaatcgtggggaattaaagacgtggggtttaatggttgcatggtatttgttggtttaacttatcaagaggccaaacaaaaggaaaacttaaacaaaggtttaatggttttcagttatgcaacttctaaagcccttgaatatcgccaattgcttgatttagaagtatgggaaagcaagaaatagagttttgtaaagatttgtaaagacactagacggggttattaaattgatagataatgaccccatcgaaatgagatacacaacaacctaatcaagaggatttaaaaatggtacgtacaacaatcaaagcaggtgattatgtaatggttagatttgaggcttcacgcattgcacctgtaagcgctcacaaaacccaccttgttttagaagtctatccagatgagaaaatgcttttaaaagggttccctgaacctgtaagtgtgaaaatgtttgatagaatggttattaacaagaaaggcattaaagcgtggtgataatccactaaaaagacaaccatagacaaacaaatcagacactaaaacaaggaattcttaaaatgactaaccagacacaagaacaagccttatcaaacgttctaggcatttcagcaatggcaagacaatgtattaaataccctaacaaatcattcttgtttatttgtgaagaccctaaaagagattaccaattttatcagaaatcttttaaggcaatagcttgtaagttaggggtgaagattcaattgtcaaaagttttactttgtgaagaagaccaaatatctatcaaagcaatgagggtgaaactaggcaaataacttctttgtaaagatttgtaaagacacttgcagggattgttaagctagtggataatgaccccatagaaacaaagcagtaaataaacacttaaaacaaaacacttaaccatgtaaccaacataaaaggatgatttaaaatgactactgttaaaacttcttctgttaaagttaactataatggcactgtaaagactcttaaaacagttgcacagtataaccgctttaaaagagaagttacacgtgacattatcaacctacaagcgaaacgtgaagaagaaatcaaagaactgaacttaaaagataaaatcgaatatcagcgcaactacaataacaaaaagcgtgatttagagaatgtttatgataagctggctttaaaccattaccaaataatcgacctgttaaatggtgaaggtgatttacaaactctttacatttaaatctaaatagattaaccctgtatagccacaagatagtaagattgtcaatggttatacggggtttttatttttctagggtttttaaaggtttactaaaaagagcactttttgctacttgacaagagtctttaagccttgacagtgaagcccttgtgctataaggttgtagctgttttcttttctttttcttgtttttcttttcttttaggctcttatctttttatcttaatagattctataaagagcgattaaaagcccctcttaacagtcccaaacgttaacaaacaaacaaccaacaataaacactcataaaagcccgtcgaataaaacccctcttaaacaacccctttaaaagaccatctaaacactatcaaacaaccatagacaaacaatcacaaacataaaacctttttaaagcccctataaagccctataaagcactatcaagggattagacaggcaatcacaagggtaaactgtaagaacctcttaaaagcctttatagagcgttttaaactattgtcacaatgtggttgttctttatgttgtttgtatgtgaacgttttaaccgtggttagttatccgtgggtaaacactcataacaagcaaccacaaataaacaacattcttaaacaaccatctaaagccatatcttaaaccctgtgaccctatacagaatgctcttgtaagaccttataagacccttaaaagattctagatagataagcactaagagaagactgaaaagagtcttaaaagacgttttatagttactcgttaacactcgttaaggggttttaggtagtaactaagaagggtctagatagagtctaggaagggtctaagaaaggtctgtttagggtctaaatagtcgcttttgctacccacctccacagactcttgtcaagaatctttacataaaattacaaagaaattgtgtaaagaactgtaaagaaggtttgtaaagagtctgtaaagaagtgtaaatgactatgtaaagaactgtaaaaaggcttgacaaacactgtgaccatatctatacaaacatttgtaaagaattgtaaagaatcttgatagttttcttcacagtgataagatgagagtggtagaagagagccttaaaagaatctgtaaagatttgtaaagagacttgacaaaactctttaaagaacaagctactaaacactttgtaaaactctgtaaagactcttgacaaactctgtaaagacactatgtaaagttctgtatagtgagtgtaaacgaacactctagaccctctgtaaagaattgtaaagagacttgataaatttctgaaaagatggtacaccatagatattttaagattttgcaaaggtactgtaacaatctgttaacggggtactaagcacctatctacagattctctaaaattctcaatagttccttaacagtatctaaaaagaacaggtttttacaggtatctaaaaagaccctagatatttcttctaagccttactgtgactagcttttagaaggttaccctgtttaataataaaaaatatatttttacagaatctttgtaggtattaccgtagtgatacgatgaacccataggtaaaaccttagaagagttttagaagagtcttatgaggggttttagaaggtatttttgaagtggttttggaaaggtctgtaatgagtctgtaaagtgacttgataggaatggtcacagacagttggtgtagtggtactctcagatattttcaaactaactgtgactagcccataatagtagaacccttactggattttataaaaattctaaaagtgtatattcttataggggtatgtcttttatcatctatgcttaataacgatacaaccgtgggaagataactaggaaggaattgtagaagggacttatgaagataactgtcacttggtcttatataggttgtcttataaaactttcagagactagctcttataacttctgtacaaataagaaagagtcttaccaaagactgataagacccttataagtatatctatataatatattatgtgacttgctttagtaatggcatcatcttaaacctttttccacatttcttggaaaaccttcttattcatgcattccatcaccaacttgtgattctcttccagttcccttttaaccttgaatccatccttagcattgattgtgacagggagtaaccccaatacaaaaatcactccaaacatgatggtttcaaccacatcaagtgtgtcaatccctttcataaagatagcaatacaagagataaacatcagcagtagaaacataacaagtgacttactcaaacgcttattagcactcttataggacttgtaagagtctgataagttctccatacgaagattacgagtacggtgtaactcccaaatcttattaaatacctcactcaaatcttcttgtgagaaatgctggatagctgcaatgttagttttgaagtaatagctattcttattaccgtcaagcacagttgttctggtaacacttcctgtaaagacttcataacctttaacaagagttctgtcaccaatgatagtaactgattcaacaaatgtatcgtaaacatggtaattgccttcaccatctgctgattcagacactggttcaagactgttaataacattgtattcaaaatctaataagtaactcttgtatagcccacgctcaataaacaagatttcaaagtctttgtagttctcaatagaatgttcttccactacaacaatctcaacaccattatcattaatctttttagtggtttctgatttaataactgtcatgatttatcccttctctttttagttggtctgtttggggctactaaaattttcggcgtaaccccttttgagttgtctaagctgatttggccttagaaaatttctactttaggcttgatgaaaacatgtttgagagcactcagcatggcaaccatccagtttgtacgcttcaccagacggataactacaccagtattcttgtcttcataaataccataagattcatttccaaccttgaggattgaagagatttctctgccagtgaatgggtcaacatactctgcactgatagcactttctgtaactctcatcacagtaaccacttgtcgagacatataagttacacccacagcctctttctcttcaattacctcagcaaagtaatattcagtgttattgaatctcattactttaaactccacaccatcatcaattacaagaaccataatactttccccctttttcctgttacagatactataaaggtctccacttaaaaagagaagaccctttacagatatttacttagccttactaatctttggttttgggtaagaacgaagaagactcatcatgaaatcatcctgtctccaaggttggaaagaaggaattgattcctgaatcttgtcaataattggagaaagaacctcatcacgcttccaccaatactgtgaagcaggtgagcagatgattaattgtttcttctcatcaatgattggtgaatctgtatcacgaaaatactgcataatcaccataccattatccatgtgcagttcttttacatcaactgctgccaaagcttcatataaactttcgaagtcttttacaaggcttacaatgtttgtgctaggtaggatgtgaccacctttacgttgcattgcaacaatagccttttcaatagtgcaagccacataagggaaaagatgtgcttttcgatgtacggtcacagaaatatggtttacaccaattgtagcctcaatcatttctttaccacagtcacatacataagcctgaatagggtcatatgaaataacactttgtgggatactacttgccatttgctcgctcactgttaattctccttactttgtccaaaaccttttcaatttctttgcaattcattttgaaagccagtagattatagacagattcagctacagtatcaagtttcttttcttttgctgtttgaacgtctacaccatcaccatcaacaatcttcaaacgatatgccaaagatttacctttacgatttactaacaaatcaccgtggaaagtaacaatctctttgtcttcacatataatcacttgacggtagatgtattcttgtgtaactctatcttcaatcagagtaatttctatgacgacaccctctttataggtctcattagtttctatgtcatagataataacgtttcttccaacaagacttgtataaggaattcctatacgtggattgaaaaccatcttaggaaaacctgcatcagccaatttgtcatagtctgcgctcataatcaacctcctatcaatcttcccactcttcttcatcattaatctctacaacagctaaagcatgtttcttcttagtgtcttgttgtagaatccaaactccttctgcactgtatttcaattcaccacttataaggagttctgacttaccatctacaccaatcagtttaatctctgtgtgccaagaagtcttgtagtagccatccatgttacgagttgtgacaacactatgaagaaaaccttcaaagatagcagtgtcaccaactggttcctgcttttcaatatcataaggcatgacttctacatagtttgatttgagcttgaacattttaagcaatctccataacatctgagtagatacggacaaaaccctgaatgataatcatacctttgtaagtaattgcgaaaggtaagtaacagtaattgtcacgatacttgaaatcatcaagagcttcaacacgacacttctgaacactgacgacaccaccgtattctttctttgcaacatctttaataacatcaatgagcacttcatcagttggagtgtcaaccatcttaaaaatggtctcaccacctgtgaatgaaatagaaacattgtagtccatcttcttctccttttgttgttagattcttttgatgaggggattatgaagagaaggggcaagatttgcaagcccctttttgtaaagaaatgttatttagactggtagataccacgtaggtacatatctgcttcacgaatacgtctattgagtaaaccttgattagttactttacgtccgttgacagtaaccttacaccacatttcaaaagcttttgcacatccaatcttattaccagctttatgacgtttcaggaaggttgaacttctaaagtttgaaacaccaatgttgtagcagatgtttactagagcatcatattcgttctgtgtggttggtacacctgcaatagctttgttaacttccatttcaaagacttttaagtcttgacgaagataacgttcagcttcttcaacagtacacaccatacccatcttgacaggaacgtcgttgattctaattgtaccatacccgatggtaggaataccagcagagtctaaataagctttactgcggaaaccttctgacaatttaatgtcattgataccacgttgagagatttggaacattattacctcctaaaagaaagggtctccgaagagacccctatttagagaattaagaagacggagcttcaatttgaactgcaaaggtgcaagacttagttccatcccttacagacgtacaagtaaccccatagatagcaggtttatcagatgttgcagtgatagtgattacaccagcaccattgtcactgacgtccaagttaccttctgtaccaccgtcagttgtcattgtgtaacgcttgtcagaggtatcttctggtgtaaatgaaatcttaacttcacgtggttcatggtcaccagcagggattcttaacattcctgtatttggaaccatgctttccagtggaatctcattaactgcgttaatagtcaactgtttagttacttctggatttgaaacagaggtaacagtaactttgtaagtaccagcttctgtaacttgagagattgtcaatcgaccttctccattatctaccaaggtgaacttctcattgtctgcatcagagcgaacaatggtgtatgacttatcagttgcacttgcaggagtcattttgattgctgtagttttaaattcatcagggaaaccaacagtgaaatccattctggcaggtgtcaaagtcataccagtcacaggtactacaggagcttgtggttcagttgggaggttagagttaccatatcgaccattaagtttcagtgggtactgtgtatagtcaatgtagtagttatctgtaccatccctaagatacaggtactgccagtcagccatcagtgtgataacacccatagaagaccaaagttcatacatagcctctggtgtaacatcaaggctgtggtctggaacatatgtaacttctggaacttcctttaaatcacaacgaggccaaggtaggaacatggagcgaggccaataccagcttggagtacccataacatcaaacttcttacctgctctaacttgagagcggaactcatgaaagaagtcaaagaagttatcaaattgtgcagctttaatcattacctaatccttattgaattttggtcacaagagagtttttcattttctcaagtgatttacgtttgtctagcttgatgccaaacttcatgcagtagtcaaacagttcatctttgtcttgaatagactctgcaatgctcatatcaaaatgctcaggtgtaggttcttcacttgtttcctcttgaggaatttcttcttcaatgacaggttcagaaaccggagcatctgaaagagtaggggtttcgaatgggtcaacgtaaggtaatggcacgtcagcacgtttaatgtggacgctatagtttccagtggacagataagctgtcatagggagaactgtatcacctttcttaaccgattcgtgaatggagtagaagaaggaggtggaatctctagaaagaagtttcacagtgttttcaccaatatcatgaacttcacaatacattgaaacatctgtcaactctgataagtttaaaggtttcactgtgatagagtgttgacgattgtaaatagtgaatctataagattccttcacaaacatcttaccgttatcaacctgttttagaaattcactaacaatctcttgagcactagttgctcgaattacaataccatcgttggtataagtaaaagttaccatcttacaatcctcttgattaaaactgattcaacatatttaaagtcgtgaaattcacttttagaaatcacaatctcttcatcgaaaggattattaagagttctatgataaaggtcactgagaatttcacctttcttgacaggtttccccatctgattgtacaggaagaataactcttccacgtcaaccgatttaattgttacatcacacatacaagcacctattaagttgaaattagaaactgagaggaaatcttgacttgtatcaactcgctctatcgtgtgactgattaatcattgtggtggaaatctgtaacaattcttttaaacgatactatcaagattctttctcacgtctttttgtctataaataaatactactggtaaagacagtctttgtcaagatttgtaaagactatttttaaccaacaatgagacaaacagacagattgtgaccaaacagtttgtaaaacatgaaaaagttcttgacaaacacttgacatacccttactcttatatttgtagagagttacttaaaagactcttcttagaatcttaataggagtttataagtatttcttttaagattctatcttattcttaatgtatgtttattaggggttatatcttataggattcttaatagactttaaaaagaggtcacacaatgacaaacagaaccaagaaaggaacctttaaaaagggtcattctggtaacccactaggcagacccaaaggtagccgaaataaatcatccctcatcaaagcacaaatcagtctagataacacatctgaaactgctgcaaagctttttgaagcagtaatctcaagagacccaaataaacttagtgagtttggacttgcagaaggggatgtaaacctgaaagcaatgcttgaggctgcaaaaattgttatgggtcatgctgctggtcagatgaaagctcttgaagctactgataaaaaagactcagagaaggacaaagggactgaacagcctaaacgtccagtattccaaacagttgcatctatctctaaagcctcctaagacgatttttatatacaatctgagcaatcatatgtctttgcatagaaatcttctcagaatcgtttttagagcgttttagaagggtttttaatgcccacacaaggtaaacaaacatacaccttaaatatctttgaaaaatatttaaaaagggtattgacaagagtttgcattttatatagtatcaaatgtatgccttctttggcttgcggtaaataccaacgttgttgtacgctgatttgtctaagattctgtacgtagttatcccccttctacgtacaggtctttttaaaggtttctttttaagaagtttttaaaaagatgttgacagagttaacttctcatgtaaatattaatacttgttaagaaattcggtgtttagctcagtttggttagagtacgtcgtttgggacgatggggtcaaaggttcgaatcctttaacaccgaccaagaacactttttagggctgtgggcgaataggaaaggccaccatcctgtcacgatggagtatgcgggttcgatacccgtcagtcctgcaaagtgttcttataagaggtattatccatgagatatttaaagtatgcttcttgggttcttttagctttaatagaaccttttgtagcagccttagcagttattcttgccccttttgtagtaccattctatagtgagaagaaaggtcaccttcctttcggattcagatggatggagacatatgataacccaattgatggagatagaggccacgttgaacgttgggctaatatcagaaagattggaaaactcggtgtttatttacaaagggttggttggttatggagaaacaaggcatataacttctcctaccacgttctaggcagaaacgttaacactgtcactaagtggaaaggtaacatccatgtgagttctaactctaaagacaaccaaacaggttatctcttaatgtggaacgataatgcatggggcttatttgctttcttaccttctgttaagattttcggtaaacagttttattggagaatctatttaggttggaagcttaaaagtgttgtacctgagaaggatgcattctcacgaaaacgtgtgatgctagctttctttatacatccacttagaaaataagattttatagcgagttggtagagcggtttattacatcggtcttgaaaatcgaaggaggtggaaacatcttccgtgagttcgaatctcacactcgctgccataggtgagaagtttttaatgagtatggtactcagcgtggctccaaactacgtaacagagggttcgattcctttcttgcctgccaaatttaaagttgctggtgtagctcagttgggagagcagtggttttgtagtccaaaggtcatgggttcaagtcccttcaccagcaccaaagcatggttagaccgtagttggtagcggggcagactgtaaatctgctgttcatagaactcgggtggttcgactccatcaccatgcaccatttttaggacgttggcttatcggtttgagcacaagacttttaatcttgggagacaggttcgattcctgtacgtcctaccaagacttacccgacagtaagaaacaacgcttccatgcatgtgattaaactccacagtaagacttggaagctttttcttgacaaatctttaaagttctgtagtattaaatatgtagcaacaaaaacattgctgtggtagctcagttggtagagcacacccctgataagggtgcggtcagtggttcaagtccactccatagtaccatagcggggtagtgaagaggtttcacgcaagactcattatcttgaaactctggttcgaatccagaccccgcctccaatacttacaagaggtctttataactaggaggttgagatgaaagtttgtctccatcctgattgtaataaacctataaagaattctcgtaagtattgttctctttcttgtgcagcaaaacactcaaacattttacgaactcagaataaacgaacatgtcaattcagaggttgtacaaacttagtaaactcttatgagaattactgtgagaaatgtgctgctataattgcaaaagagcgcaaacagttgggaatcaagtttccaccacttaaaaatacaccaaggcagaagttaaaacttcaagctgtaaagtataaaggtggtaaatgtgagatttgtgggtatgacacttgtcagactgctttagaatttcaccatctagacccaaatgaaaaagacttcgccatatctaagaagtcaactacatttgataagattaaaccggaacttgataaatgcattatggtatgttcaaattgccataaagagatacatgaagcccaacgtataaagaattaggtggagtaacacaacggttgatgtgcctgactgttaatcagagacaagtaggttcgactcctacctccaccgccaatttaatgctcttatcgactaattggttaggtcaccagactttcactctggaaatatgggttcgagtccctttaagagtaccatttttacgttcattttctttcttcctttccactctctattatttgcgtttcgtttctttctaggggtttcccgacacaggttaaccccgcttttttaagctttatggggaaggttctcaattgctaaaatatgattgagttagacagtccaactatagagttatcgtaagacctttacctgcgcaatgacgtcacttaggtatcataggcagaaactgttacaagccctttagcaaggtttggttgagagtcttccaccataaagtttaatgccctcttagctcagttggatagagcaacggccttctaagccgtgggtcacaggttcaaatcctgtagggggtgccatactctaggagagtggtacggtaaccactcggttagggaggtgattccatatcttcttgacagcaaggctaaaactgtagggtgaaccgtaacactgtgaagtagtgatgctaacccgatttattaggatagaagaatgaagattacccaaaagaacaaagatttatttaaactgcttaaacaaggcagtgctaaagtaaaccctaacgagaatgaatacaacattactaaacaagttgtaacatcctctcaacagtctgttcagtccaaatatatcggtctgactcagcctacaaaagatttgtttacacagcaaggtattacatcatcttttatggcaaaagaggttgtagaggctttccagaagcttttagaggctattgagaaggtaaactctcattcatggttcatcatcaatgagttctctcagagggttgctatttgttactcataccataacaacctaaagtttcttgatgagacctacacaaaagaccatccaccattccctgaaacttttgaattcttatcagatgttggtggagagattctagagttgattgccaacttatctaggaagattagagatacatgggactcactaccagaacttccgacacaggacgatgtggtaagggtttctaatgagacaaaagaatttaccgctcaagctgtagacctagctgttcatacggttacacagattaaccgtgatacaaaatgggttcagacaatggttgattcaaataccaatggatggattgccaaagttcttcctacttggaatacagaagatactctgactccaacaatagatattattttctctcagggtgttaaagatatcctgaatagacctgaataactgtcatggttatgtttccttacttgtgaatatttgtgttcatacaattaacgtcctcctttttgacccacattactgattagttggttttgtgggtcttttttatgcctatcttttaacaaatcccttgccaaatttaacaatccatagtaattttaaatagtcaaagcaactttgattctccttattaattgggctgtacaggctatttttgtacagtcctcttttctaattaactaaaaaggtaacatatcatggaaaataaagtatacaaagatttgtacgaagctcagtctactaacaaacagttggttgaaactctgaactttgttattggctctctggtagatgcttctggtgttgatattcagcaggaaggtagcttggaaaaattcattgaagaagttaccaaacgtattgttaagactgatgccgaagaagttgaaattgtagactaataatatacgaggatgcttaatggatttaaatgctattaagcagaaacgtgttcaagattttaaagcagtgagggaggggaaactaaaactctccccaactgttaaggctatctgtagaaagtacggtaaagaccctgacaaattcttccctcaacaagtcttgacacttctgcgttatacagatgagcaagttgaactaatcatgcgtcttttaacagaccctgattttattgctccacaagctggttcacaagaaatcttcttaaatacatctgctgatattgttttatatggcggtgctgctggtagtggtaaaacaaacgcactgttaatggatgctttaaaattcattgacgacccaaactttcgtgcagtttatttccgtaaaaacactacacagttagatggtggtctttggcctgatgcaaagaaactatttagtcgatttggtggtgtagcacgtgaacaggctcatgagattaattttccaagtggtgcaactatcaagttcacttacatggaattagaaaaacatgctgaatcacatcagggtattcaatattcagctatctattgggacgagtttacacatttcagtcgcacacaggtcttgtacctcatgtcacgtctacgttctggtgcagaagctgactcatacatgaaatgctcaatgaaccctgaccgtgaccattttgtgtttgattgggttgaaccttatcttgataaagccggatatccagacccaacaaaatgtggtaaactgcgttactttgtgatggatggtggtgttttaagaggttattggtcagaagaagagtgtattcagaatcaccctcttgatatgccaaaaacatatacattcattcagggtacaattgatgataaccctgtgttagacttcattgaaccaaagtatcgtgcaacattagaacagaactcccctatcaacgtagcccgtttaagatatggtaactggttagcacgtgcagaaggttcaaactacttccaaagggaatggtgcgagattgtagacgctccacctaaagatgctgtgagagttaggtcttatgaccttgctgcaacactaccatctgaaaagaaccctgaccctgactatacagcaggtgtcagaatgtctaaatcaaaacttgatggttgctactacgtagaacacgtagagaagtttagagaccgtccaagtggtgtagagagtaggttacttgctttagccaaccaagactctagtaaaacccgtataacaatccctcaagaccctggtgctgctgggaaatcttatgcatcctctcttatcagaaagcttgcagaaagaggcttccacgcaagagctaaacctacaaacaaagacaaggttacaaggtttgctcctttctctgctgctgccgaagctgggttagtgaaggttgttagaggttcttggaatgatgatttcttcacagaattagaagggtttactggtgatggcagagggcatgacgaccaagttgacgccacaagtgatgcatttaccactctcaatgaagttaagttcttaaaaacaccttctatgggttctgtacctaaaatggtaagagataacccataccaaggactaagatactaggaaaaataaatgtctgagattacgtcacaaccatctatgccaccttttagacaaggtgaagttggtgctcttggtctacgtgttatttctggaagaattcttgaagaacctagaaggaatttacaattccctgaaagtatcaagaccttccaagtaatgatgagagacccttctgtagctgcttctattaacgttattaagatgtttgtacaaacagttgattggcagtttaaggcaccaaagggtaaagagaatgaccctcttatcaaacaacgtgtagagttcttcaattcattaatggatgatatggaagaatcttgggaagagtttatttcatctatcctatctatgtgtatttatggtttctctattaatgagaaagtttataaagtacgacaaggtaagaaaggtaaatacaagtcaagatacaacgatggtttgattggttgggctaaattacctacccgttctcaaacaacagttgataagtggtattttgatgaagattgcagaaatgttatcggattcaaacaaaaccttaaatctgtaaactatttagcaagtgctgatgtaactaaactagaacgaactattccacgttctaaattcatgttgttcaagtatgatgattcttgcggtaatccagaaggacgctccccactaattaacgcatatgttccttggcgttataaagtacaattggaagagttcgaagcaatgggtgtatcaagagacttagtaggtatgcctaaaattggtcttccacctgattatcttgcagaagatgcagacgaagataaaaagatgttcttggagtattgtaagaccatcattaatgaccagattgcaaataaccgtgctggtttaattgttccacgttttattgaccctgaaactaaagaagatatctttgaattctctctggtatctcgtcaaggtgctaaagcgtatgacactgctgaaattattgaacgttattctaaacagattatgatggcatttatgtctgatatcctttcaatgggtcagtctaaatatggctctcattctttggcagataacaaaacaagtatcttggcaatgtcttgtgcaattctattacgacatatccggtcagtgattaaccgtgatttagttgcgcaaacatatactctgaatatgtgggacgatgaagaacatgtagagattgacttctcagatatcgaaacaccaaacttagaaattattagtaagttcattcagcaaacagttgctgtaggtgctatcgaagttgataagccaatgtcaaattacttacgctctctgattggtttgccacctgctgatgaaactcaaaagatttcagaagatttgagtccacaaactcaatctaaagctggtgaaggttataaaactgctggcgaaggtactgcaaagtcacctagtgctatcaatacttccacggcaaataaggctaataagtaatggcgaatattctctctatttcagaaagagttgtcgtatctgattttagaggtattcagacggtacatgaaacactctctgtaaagaacctctctcaagtggtatattcagggagtgttgaccctgcctctgtagaacctgtaactctctgtagagattttaaagtcagattagacggaaaagagtttattaagggtagttttagagaaattgttaaaattccatttgacagttcgtgtaaagtgggtgtacagttatatagttgtaacagaaaagtgctgaatgtttcagagattgctcttgctttctttgaagttgatggtgcttttaaggttaacatgactattgacccccacgataacaaactttattacgttatttcacaagaagactacaaaacacttgtcaaaaataaagtttatgatacatttgtaactgtggtggataaaagtaacaattcctctattgtattcactcgaaaagtgaggttcaattaatgtctggtacattatcagtagagggaaagaacaaaattcttgcttctctgctaccaacaaaaatttctttacacaatgacgtaatgccaattgtaggagatattaaaactgaaaaggttgatatccatttcggtgctcctgacaatggtcttatcgcgtcactaggcaatgtaattatcaacgttaaggctggaacaactgtaacacattatgcgttatgggatgccgaagatgttatggttgcatatggtgaattaacctcttcacaattctttgcacaagatggtgtctacgtcattgatgcaatgtcaattgatttaaataaaggtgtagcttaatgacaggtaatctatttagacttgctagtagagtctttaataagcctctcttagcaacagaagaccttgctcattcagtttccacatacctcagtaatcgcttatataactttgataatctaaatactgaacagcttgcagttaatcttaataaggttaaaggtgaagcagcagattatttaaaagttactgccgatggtgttgcaatcatccctatcatgggtgccttagctcatcgtatgagtggcattgatgcaatgtgtactggtggactgaattcatacgaaggtattcgtcgtgcttttgatgaagcaatggcagatgattcagttaaatcaattctgttaaatgttgattcaggtggtggtgaagcttctggttgttttgaattagcacgtcatattgcctctaaacgtggtgataaacgtattgtagctttcgttgatgagtctgcttgctctgctgcatacgctcttgcttgtgctgctgatgagattgtggcaactcctgaatcaatgactggttcaattggtgttgtaatggttcatcaagaagtctctaaagctatggaaaaggctggtgttacagctaccgtatttagagcaggtgctaataaagcacttggcactccttatgaagctctcaacgatgaagctaaacagaagtttgaaaagcgtcttgcagaattacatgatggttttgtaaatcacgttgctaagatgagaggaatctcacctgatacagtacgtgctacagaagctggtgtattcaatgctcaagaagccttggacttaggtcttattgacaaagttatgtcaacagatgaactagaacgttatgttggaagttctcttgaaagttcttctgttagctccgaattaactgtaactccaactaacacaggtactgaaatgagtgaacaagagttgaaagaactccaagaactgcgcgaacaagtagcccaatttaaggctcaggaagaacagaaacatgttgcttcactggctgaaactttggctgatagtgcagtaacctttggatttgatgccaatgctattgctggtgcaatgctggctcacggtaaggaagctcctttgagtgtagctttcatgaatctgttaacctcagctaatgaaaaactggcagaaatgtcagagaaacaccaagctgaattggcagaacaaacacgtgctattgaggctgctagagaagcagttattacctcagaagcaatgaaagaattgggtgccgaaggtgaagctgctgccgaggaacctaatactgacttgtctccaaaagcacaagttaacaacaacgaattactgttagctgaactgaaaaagttagctctacagaacgcttaattttaaaattctaagaggaattaaataatggcttttaaaggtttcattgatggttacactcgtcctgctctgcaagatatcgtactgtacgaagtatctagcccaaatggttggtctcgtaaagtaatcgctgctcctaaagcttcttatgaagttggtgatgtagttgacgaagcaggtactaagattgttacaggtcaagaagaaaatgcctttggtgttgttatcactcgttgggataataacgaagaactgactactcagggtggtatgctcaagcctactatgattttccgtgatgctgaaatcaaacacagtgctctgaaaattggtgaaggtgctgaccgtgccaaagttctgaaagctctggctgctcgcggtattgataccattcttgataaagaagttgcttaatttaaaactaaaaagtgtattttggagaatttataaatgactactatcgctaacccaactgataacatgttcctgtctgacctgactggtgttgtggaaaacattcctaacacttacggcctgattaccaacatgaatctgttcaatgcgaaccctatttcacagacctctttcattcttgacctgcgcgagtttgatatccgtctgcaagactctgtagaccgtgactctcacgatgctactaccattgactcagatgttgtaaaacagattggtatggttatgccttacttcaagtctgtagaatctctgactccaatggaactgcaaggtgttcgtcaagttggtactgcaaaccaacctgaacaggaagctgctgttaaagctcgtaagctgatgaagctgcgtatgcaacatgctatcaccaaagagttcttgatggctcaggctctgaaaggtaaaatcatgaacccacaaggccagttgattgctgacctgaatgctgctttcggtgttaccaagaaaaccttctactttgacttggataaccctgctgctgatatcgacggtactatcgaagctctgaaagagcatatggaaaaagaagctctgactggtgctcttattgacggtgaacgtatcaaggttctggttgacagcgtattcttccgtaaactgattaaccatccaaaaattcgtgaagcgtatctggcacagcagtctgctacagcttatcgttacatgactggttctctgcgtactggtgtaagtgatggtactgctgctcgtacttctgagttcgtatacggtggcctgacctttgttaagtacactggtgctttcaaagatatgcgtggtcagaaccacaaactggttggtatctctggtgttgctgataccgttggtgttggtcatgcattccctgacacttctatgctgggtgctgctgctgacttgtatcagattgcatatggcccatgtccaaagatgggttatgccaacactcttggtaaagaactttatgctttcgaatacctgcgtccacgtgatgaaggtgtagactttgaaatgcattcttacatgctgccatactgcacacgcccacagttgctggttgacgttcgtgctgacaaacagtaattaatcttgaaagaggattattcagatgtatacaaatgaccctgctaataatcctcttgatagagtcagaattctatgcaccgacacagacaacgatgaattactcattgaacagtcggtgctagagttcttttacgaatcttctaacagaaatgaaaaattagctgctagacgtgcattagaatacctcctattccaagttgccaaaatgggtgatgagaaagtagggggtgtttatttacgtaatagtggacgatacaagaacttgaaagatgcttataacatcctcttgaaaggttcttggatgggaggtaaaccctatgcaggtggtatctctgtatctgacattgaaatgagaagacgtaatccagactctattaagaaagcaactgaacaaggtgattgctttgattactacacaagagaccgttataacaatgacgaccctgatgcagtaattgtaatccaaccaagttgtgacagagattaatataatggttaagcgcgtagcaaatcctgctagagcaagactgttaggtactgtgaagaaccttaaaaagaataaggctcaagttgggtattttcgtgaacagggtcttcacagttccggtttcacatatcctgctctaatgtatcttcatgaagtaatcggtatttctacaaagtctggtaaggtttatagaagggcttttgaaatgacttctatgttcatgaggaaatcccttcaagataaagtcaaaaaagatttaaaccaattgtttaagtctggaaatattgaccctaccaacgttttagaaaactttgcaacttctctttcaaatggtatcaaatcaacatttggtaacccaagcattcttccaagtaatagcccattcacaatcaaacagaaaggtgctaacactccattggttgaaactggtgagttaagagacaaccttgcttataaggttactactaggaaagggattaataaaacatgagactattaagacgacataccttaacagttcgaagaagaattgacgaaggttactacaacgaagacggacgttgggtttcatctgatgattatgcagaagaaactattaagggtaatttacagccttatgtaaaaggtaacattaagaacgatatgcagttagtcttacctaatggtgtaagaacaactgatacaatgattctttatacaactgctgaattagttatctgcaatgaccgtaattggacagaagccgatttagttatggttaaaggtactgagtatgaggtttatagtgtaatggattggactgagcaattagcccatacatcacattatgaatatctacttattagaagagataaaatgaatgaacttagaaacaacagagattgaaaacggtcttgttagaacactcattcaagttatcggacacagattagctaaagacacaaggggaagaccaaatgttattgttgcttttcctactgataagagaaatgagaaaggtctcaaaccagaccaaccatttattaccgtaggtgttgttaatactgcaactccttatggttggattctagaccgtttcgttgatgaagataatgttctatgttatagaattgcctttcaagtaaccgttcaagtagttgtttatggaaaacttgcacataatatcttgacggaattgaaacaacgtttagaatttaatagtacaagagaaattattcagggtgagactggtgctgttctagttaatactggtgagttaccaaataactttgattatctttcttctgattttgaaaactctgccccgttatttttaacactgaatgtaaactccatcctaaaagaccctaatggtgaaatcattgaaagagtcattgcagatggtgaatacaagtataaatatggcgataaagcagaatacacaattcatctagatgaggttagtaaataatggcatggcaagaaattgttgatgtagcgattacattgaatactgctggctccactcgcgaaggttttggtcttccaatcttcatcacttcaacagaccgtttcgaagaacgtgttcgtggttatacttctcttgcagatgtagctacagatttgggtgaaatgagtcctgcttatatggctgctaaagcactgtggtctcagacccctaaagtgactcagctttatattgctcgtcgtgatatgcagtatatcgtatctattccagatgctgttcagggtcaaactgaatatgctctgacaatttacactaatggtggtgtttcaaacaacattacctataccactcaggaaagtggtgatgatgctaagatggtctttgataagctgaaagaagctattgaggcaattgaagcaattaagacgaaggtcaaagtaacagtgtctggtgctggtagctctgcttctatgcttattcaggcagaagaccccgatgtagactttgttcgtgtagttgatgctgctgattctggtaagttccttatctcttcaactgcgtctgatacagcagaaagcattctgtcctctattgatgcttacacaactgattactactttgtagctgttgatgaacgtgagaagacttttgtcactcaaatgtcagaagctgtagaagcacgtaagaaaatcttcttcacctgtacaaatgatagtaaatcactaatcggtgaagatattacctctgctgacgatttagctgctttgctggctaacaagaaaatgtctcgcacagtagtgatgtggcaccacaatgcttcaatcgactatccagaaatggctttcattgcatatggtgctccatacgatgcaggttctattgcttggggtaacgctctgttaactggtgttgagttctcacgtcagactattggtggacgtccattaacaagctctcagaaagctgctttggaagcacgtaactgcaactacattgatttagatggtgggttgagtgttgtacgtcacggtaaagtatcttctggcgaatggattgatatcatccgtggtgttgactggcaggaaagtgatttgaaaacttcactgcgtgacttgctggttaatcagaagggtggtaagattacttatgacgatgttggaatcacacgtgttcgtcaagtaattgaaacatccctgcaaagaggtgttaaccgcaacttcctgactagcttcaaagtcagtgttcctaagtctgctgatatttctatccaagacaaacgtgctcgtatcctgaaagacgttcgctttgaagcaatcttagcaggtgctattttggatgttgtactgcgcggtacagttgcttacgaataattaaaaaaggtgatttgaatgtcaatgtttcaacagtattcccctaaagatgtagtttgtagctggaacgggattgctattacaggctttgctcctgattctttcctgcgtctgcaaagaaactctgatttggttacaccagtagttggtgcgggtggtgacgtagctctgacccgtaatgctgataaaactggtactatcgaaattgaacttatgcagacagcagaatcaaaccagtacctgaatgctctttatgcaaaacaggaaaacatggaattggaattagatattgcatctaacttcattatctatgacccatctggttctgtaatggcaactggtgtcaacgcatggttacaagctctacctgatgttgaattgggtgcagaccagaactccaaagtatggacatttggctgtgagaaattagaaatctctacaaccatccctgcttctggcgtctaattagttaattccaagggggaagtctctgaaaaggggctttcctcttttttgtttatataagagagaaataagaatgagtacattaccagcagttaaaagtaaagagattaacggaaaaacctataacattattttgctaggaacacgtgaaggtttgggtgtttctatgaagattggtaaagcagttttaccagcagtagttgatgtagttggcgctattcgtggtcaagatgaattaaacttcacagaagctgtaaaccatttgtttactcagcttactgataaagagatgaatgatattctggataaacttttcaaaggctccactgtagacgacttccctattaattgggacgtatatttccgtggtaactatggtgagttggttgatgttgtagcatttgcattagaagcgaacttttcaagttttttcgaagcaagcattttcaaaaacctgttttcgacttctcaaaagtaacagacgctggtaagtgtccaattactgatgatgctgtgaaaagaacgtatgaaggtgaccctcttatgggggtcattctttcagtatacagtgatgagaattgcaaagaaactttgtcagaactcctgaacatgccattcacagactttatccaactcagggaattcctagaagtgcaagcttcatatagagaagagtcccaattcaatcaacttagacaggccaagaagagataaactaaatgagtgattataaagttgatgattttctaattgaacttggattcagtgacaaagttacagaaggtttgctaaaacttgaaaaaggtactatggctgctgctcagagaattgaaaaagctctgaataaagcctttaatgtagatgcctctaaagctttaaaaccttctctgacaagaatgttgaaagacactaccactgtgtctggaaagattcaaaaatcactgaatgatgcgtttaaaattgaaagtgctacaaaggcttctatgaagaatctggaacgtcatgttaaccagacttctaaaaagctaaatagaacgcttaaacaggctctaagcgctaatggtactgtagacgtcaaggtgagaggtagaaagtccaccacaggcgatacaggacgtcctagaggtggttctggtacaggtggacgtacaagcagagaggatattctgcaaagacagatggatagaatgtataacaaccaattctattcaggaatgacacgtagacttgaaatgatggcttcacaacaagccactggtaaagttaaatatcgtgctgacccaagcctcaaattacaagagtttcgtgcaagtttagaaagtttaagagagagatataaaggtacaggtaaagtttcagaataccaaatggaactgaaacgtatgattgacgtcaataagaaatggattatgacggaaaatgcccgtatcagacagatgcaaaaagaagcatggatgagcgaacgtcttaatgcatcaactaagcaattgattggttcatttgtatctctgtacactgctgtagaagttgctaaacaggcaattgatgctggtgttaaaagacagactgcacagttagcttcacaagctgtatttggtaaagataatgtagtacaagcccgtttattcgcctcatctttctctcaacagattggtcaaggttacactgataccttgaaacagtacactggatttgctgctggtgctcaaccagttttaggctttgaaggtactcaagagttctataaaaatgctgctatgttctcccgtatcagaggtgcttctgatgaagacttgaaagggattatgacagcattccaacagatggcttctaagggtaagattcaggcagaagaattgcgtggtcagttgggtgaccgattagctggtgcggttcagttgtttggtgatgctcttggtaaaacaccagaagaacttgataaactcatgaaggacggtaagcttcttgctaaagatgttcttcctaaagtatctgaaaagatgcgtgagatggttcaagctgctggcggtatggatgcagtttccaagcaaacagctacttctatgggtaagctgaaaggtgaatgggaaaacactctggtatccatgtttaatggttcctcagaaggtatttctaatatttcaacctcattagctggcttcttagaaagtgcaatgggtgttacagatgcttttggttggtctattggtcaattactttctagtatggctgatggtgtagacgtagcttctgactggacagctagaatctctgctctgattcattacactcaagcttggtacatgggcttgtcagatggtcagaagaagcttattgatggtgctgtagatattgcttccaaagttgccttaatcactgctggtgtaggtgctttaagtggtgctgtacgaatctttacaggtttgattgctaagattctgtcccttgttggtatgaaaggtgcagcagatactttgacaggtgctggtgcaggtgcagcagaaacagcagcaagtggtagcaaaggtattcttggtagattacttggcaagaaattaggtttaattggggttggtgttacagcttatgaccaagcttctgattacgtccaaggtcacaaagagttttctaactacacaggttcttattgggatgctttgttagagaaccgttttagacaagctggtcagaaaattgataatgtggttaacccaaaagaccctgtattaaatgcaccaattgtttcaagtgcaattgacaatatgcaaaattgggcttctacattgcagccacctacaatgatgcctaattacatgcagcctaccatcccaacttcatttgcacctttgcagcagatgagaaaacaggaaatctctgttaagttacctgaccaaactcttaatgttcaagttgaaatggacggacaagtatttgctcagaaagttattcagattaataaccaacagagtgaagctgatatgcatagcactaacattatgacagatgattaaggggtttaaatggctgttcaagtcttacctgtaagatattctggaaatgactctatttatttccatttgagagataatatcaatgagtttctctcattaactgcaacaacagatttaagctatgatgcaccaatgcaggtaactactcagcctatgcaatccggtcagactattacggataactatcaaagagcaccaaggacggtagctctgactggtgttgtggttgtaggttactcaggaatctttttaaggtctttacagactcgtactgtagagaactttattacaacatgtcaactatggagagaccaaaaacaaatcttatcagttgtttgtccagatggtttagggctttcagactgtgtgattaccgagtttaaagcctctaaagatgttggtatcaagaatggtattagagttaacttgacattccaagagattaactttagaccaattgtaggtagaactactgtaacaactgaacagaagtcttctggtggtaatgcaaccacaaaagatggtgctacaacaagcaaaactgttaagggttctgtagccactgacattggtactggtaaaattggctgtcaaggtcttattgatgccaagcaagcaggtgttattagctttgatgcctcaatgactaaagctgtagcagactgtgaatggtctcaaaagactaccaaaggtgtgaaagacttctctccatctgcaagtaagcaagcagaagaccttatgaaaaaacacggtttaaatcctaacaagagggttccataatgactttaaagattcctgtaccagatgcagattggtctcaacagactgtgacattagatggtgcaatctttttggtagatatgaagtggaaagagcgcactcaaaggtggtacttgacattaactgacactgatggtaatgtgttacttactgaaaagaagtgtgtaacagatatgtcacttactggtaggttctctattcctgaattagcaggagaaatctttgtagagaaaatctatggtaactcagaatatccaaccagagataattttggtaatggaaaagagtttgaactcgtctattacacagcagaagaaatgagatggtttatggagattcactaaatggcaacagttgcaaccactagggacgcagcttcttcatttagatgttatcagttagcagtgggtacagaagcacaagccttccaagataagtctactcagcatactaaaaagactgaggatttgattttctttgacaatcttgaattcactgctaacgtttcttatacatctgataagaatagaagctctaccgatgatacaacattcgagatttataatctcaactctgaaatgaaatcctatttcaagaccattggagcaacagtcctacttagggctggttatgaagataactttccaagagatgaaaacgggtatgtaaaaccaaactatgaagaacttcctgtaatttaccttggaactgttgagtatgcctacacttataaacgtggtgtagatatgattactcgcgttatttgctcaaatgataagtttgaaagagcagttactaagagttctgttacatatcctgctggtacaaaaagagaagcaattattcgtgacctgattaaacaattaggtttctcagttctagaagcagatatgaagagtgtatcagcttatacctatgtaaatggctttacagtttatgggagcacagcagaagcgcttacaagagtctgtgaagagaatggtttacgttggtttacatttaacaaacaaatccgtattgttgaagctgaaacatctgcaaaaacaaatgcatggattatctatccagagaacgtaatagactctattcagggatattacaaacggactaaaaagaaagttccaaagaaagcccctaagaaacctaaaccactcccatctgacgttacagaagtgaaagaaggtaacgcaatctatcgtattaaatctggtgtacgttgtaaaattcatttagatggtagaattagattaggggataatatcgctatcaaaggtacagaagactttgatggtcaatacagggtaagagcacttaaccactcactaaactttatgtctggtgaatggacaacctctttagatttagataaggtgtctcaataatgtctaatatcaggaattcctcagttcttactaattatcttgatgattttaagaaagaactatatacaagtattcctgcaaagattgtggcatataatcctgaaacccaacagtgttctgctcaaccattactttacgttgatgatttagaaatgcctaccatcactggtattccggttattttcccttccggtggtggtggggttttaacatttccagtaaaggtcggagacaagtgctggttatcattctctatgctacctcttgaacagttagctacaggggatagtaataaggcagtttctgttaatggtaaacgttcacatgatatttcagattgtgttgcttttgtaggatttagttcagctaaacagaatttcaaaccagaccctaataatgttcaactcaagtttgggtctttatcatttaccttccaagaagacggtaaggctattttagatggctctttacatgtcactaaagagattaccactgacaaaactgtttatgcaaaagaaggtatttatggtgaaaacttctataaccatgatggtttagattttaatagccacatgcaccattattactggactagtagcagtggtgaagatgaaacccaacctcctgcataaaaggtatttataatggctacagattttgcattaaatcttggtgctggttatacagttcaattaggccaagagaagattttcgttgaccacggagattttaaattaagaccggacggtcaaatcaaattaattccagatgatgatttagctactcaagttgctcaaagattacatattagatgttatctaagaaaaggtgaagtgttctttaacactcaagctggattcccttatgctcaacttggtaagtttaaaactcatacaagtatttttgataactacatgaaacattatattctagagacacaaggtgtagatggcctctacaactatgactcagttctagataatgccaccagaaagattacattagattttgatgtaacaaccaattcaactggtcaaccaatcaaacagtcagtagaggtgaaattataatggcaggtatgacagcaacaggtttggttactgatagatatcaacagatttttgatagaatcaaagaccaactctttacagaactctctccaaacttagacttatcagagaactcagatatgggtatcttcctagcaacagttgcaagaagtttggcagatgttcatgaagtaatctcagaagtgtatgactctcagattattgataaagccgaaggttatgcacttgatgaactcacagcactcaatgctatttatcgttatgtagaccaaccaacaacaggttacgcagaattcacaggtgatgttggtgccagtgttcctagtacaactcgtctaagaacaacatctggatatatcttctacccaagtgactctttcgttattcgtccaagtcgctgtatcgaaactcaggtaagagttaacaacattaaagctgatgaagactatgtaattattattgataatatctcatacacatatcgaccagattctgtagttacttctgaaaagattcttacagaattagctaagtctattaatggtggtattatcgctaaagcacaagttcttcatgacgatgataaagacaacacaccttacctgagaatctacaaagatgaaggtgataaagtagaacgtacaaagtacatgattatcactgcaacatcttatatgacatttggtaagacgacttgttactaccctgtagtatcagaggataaaggtgctattattggtcttgctgggactctaattgaaattgacactcaagtgactggtcttgacagtgtttataaccgttatgacttaacaactggtagagataaagaaactgacacagagttacgtgaaagatatttatcaagtcttattgttactggtgtatccactctagacgcgattgtatcgaacgtagagcgtgtttctggtgtatctgatgtgattggtacagagaatgatacagaagtccctgtagatggtattcctgctaaatctttcaagattactgttgtaggtggtgacgtaaacgaaattgctcaggccatttgggaaagtaaacctgctggtattagggcatttggtacaacatctggtgaagcaattgatagccgtggtggagttcatactctattctttgctagacctatcccacgttatgcatttgttaaattgacatacacgatttatgatgaagagtctttgagtgtagagaaaaaagacttgcaagacacaattaagttggcaattaacgaatatggacgtacacttaaagttggtggagatattatccctaaccgcatttatggttatgtgtataaagctgttcagggtattgtagttaatgaaatcaaagtagctacctctgcaaaccaacaaacaaaaccagatgaaagtgcatacacaacagatagaatctcaattgctgctgaccaatatactgtttgggaatctaaccaatacgatttaacagaggaacctcagtaatgccttatacgcctattgaagattatttcactaaggctattgatgagaggacacctacacaattcaaagaaaagttcatctacaccactttcttaaaagcacttatgaaagaggttcaaattacagaagaacttgcatggaatgtttataataaccgtaacattcacactgctgtaggtgtccaattagataaccttggaaaattgctctctactgaaagacctgtagggatgccagacgaccaatacagaactctgttatttacacgtgttatgttacgtaggtcttctggtactcctgaatcattaatgtcttcaatggggagtatttataattctgattacactcaaatctatgaacatatcacagagaaatatatgacaggtggtattgtcatgagggtacgtactcagaatgaagtaacagatgccacattgacacttaacaaaatctctccaacaactactggttgtgttgttatcttgagagacagaactcctgatggtatggcatggactccacaagaagttacttctgaaaaagaaggattagtggatgagaaaggtaaccagtttgtgacagatactaaccgagctattgttacagctaccgacgcaggtggtagacttaaaatgtatggtgcaggttgtttagcagatgctggtttaagaaggggtctgttaaaagttaataaagaaccagatgatgaaggtttgttattagtaactaaaggcttacaagaaggtgctttagcagttgaaaaagaatctattcttggtggtacgtttggatatatgtgtgaagtctctcaattaatcagaggcaaaacagaacgtgaagatgttgaaggagaatcctaaaaatgagtaaaaagactacacgacagcttggctctgtcaatgacaatcatgaagttttaaaaagcttactgtttcaatgggctgtagatgaatttgaccctgagagtaaccctacaaagattgttccaccagatgaagttcaacagactggtcttttaaaagatgaaccaatgggtagacagtggtttaactacatgatgaatgctttgtcacgtgttgtttatcatctctatcaagagactcatattgatgaaactacacctgctactcatgagattcgactttcagctattgagagacctgattgggttcaagttggtttcgttctgtttagaaccgatgataaccaattagatagctctggaaagatttattggtacgaacaccaagcacctcaaattggtcaagaataatttatgaaggggtcttaattgacccctgtttaataggagtttttaatggcaattggtgaaattcaaattaacgccttaccggaggcttccctccctttgcgtttaactgatatcatgcatttgaaagaaggtgttgaagatagacgtgccacgcttggtgatgtactttatccacatacatctcgaacagataacccacatggtgttactaaaaaccaagttggtttaggtaatgttctaaatgaacttcaactgattaagtcaaataacttgtcagatgttccagataaagtagttgcaagacaaaacttagagattctttcagcagatgaagttgctcaggctgtagcaaatcacgccaaccgtacagataacccacatggtgttactaaaaaccaagttggtttagggaacgttttaaacgtatcacagttagagcgtggacagaacttagcagatatccctaacaaggttctggcaagacagaatttaggggttctttcttctgatgaggttcaacaggcaattggtaaccacatcaatgataaagggaatccacatggagtaacgaagacacaagttgggttaagcaatgttcaaaactggacagaaacccatatctacactgagaacaatgcttctaaatacgttgcagcagatgccctttataaactttacaaagcaattcaagaccagtatccagttggtagtacggttatctcatataatgcagctaacccttcaacataccttctgtgtggcggtacatgggtattagcatcaaagggtagatgtttggtagggtatgatgatgcaaacgctggtagggctgtaggttcacaatttggtgctgccactgttacattgagtgttaacaacctaccatcacatactcatgccgttactttgacgggtggtgctcataaccacacagcatctggttcagctactaatgctggtaaccactctcactcaacatatattggctctcatagtcattctttcagtggtacaaccagcacatttgactatggcactaagaacactaatacaactggtgctcacagccatactattgagttagacagaggtgacagaggttatggtagagctgaacaggcaagtgaaggtttggatagacgtgccaatacaagtacagagggtaaccactaccactctgttgcaattggtgctcataaccacactgtgagtggtaacacatcagcatttgattatggttctaagacttcaaacaccacaggagaccacactcacgcaatcacagtatctgttgctaccaacaatagccacacacattctggtaacacaaatgctacaggtggtgggtcagctttctctgtagagcaaccttccgaagtagtttatatctggcgtagaacagcttaattttacaaggggtctttctagagcaatctagggagaccctttttcatttatgctgcattccctttacaaaacttgacaaacaggtttataattgaactctgatgagaaaatttactcaaacttattttaagaggattaagtttaatggcagatgatgtattgaattactataacatcgaacaattaaatagattcgacggagacttaatctctcaagactacttattagttcgtgtttcaaagcgtactaacatggtttcacctcaagatatgaaagtatcaattggtgacttcttacgtggaactggtttggatactaaggttgacaaacatggtgacgtgatggttggagagttgttacttgctaaccgtgtatttttaggtgggttacttacaactggtgaagaaaagaaaattgcacagattgacgataaaaacgttctgtggattggtgatgaagctttacctttacgagttcgtgctgtacagaaccctacagtaaccatcaacaacaagcaagaaacattctatcacactggtttcaaaccatctgctacagatgttggtgcatggtctaagatggaagctgaccaaagattcttaatgaaatcagttagctggaaacagaatgcaccattaacaatgcgttcagcagatatcatccaagacccttctatgtgggatgctggtttctcagggttctatagagctaatgatacaaaagatttaaaaggtctgaatatccatattgctcatcctctgtttacaaatggtgctcattcacgtggtattacatttgaatatggtggaactggtacaaaagcctatgtatatggttttgataaagatggtgtaaaacagtctaactataaaatctatacagaagctgacaaaccaactcctaatgaacttggtgcatacactcagaaagaagtacaagatttactgttacaaacctctcaatgggcttctagaacattcgttgatgtgacaggagataccatgacaggtgcattgactcttaatgggtcagatgaaaaccgtctaatcttgaaaagcagtgatgatatgatgggtaattttatccatttcattgactctactggaaatactattgctcagattggtaaagatgttggtgaagattctttacatttactgaatactaaagatggtacaggtcttgttttagaatctgataaagtaactgcttcaaagaacctctttgtaaataacttcaaagtttatcatgaagggtttaaaccaacctatgcagatgctggtgctgtttcagcttcacgtaacttaggtacaactgacttagatactcttcgtggtaaccagtttgaaggtaactggcaccaaagaaatgatacagacgcaaccacagcaagacactatccagtagctttaggcggtactctatctgtttacatgaatggtatcaacggttgtgttcaggtttatcgtgctaagtctggtaacaaagtttatcaaagaacatatgatgctactgttggttcatgggctgattgggtaaaagtctttaacagtgaatttgtcccaactggttcagatatcccatatattgcttcacagaacatctttgtatcatctggtgaaaaaccaaaccctgattacacagactttaatgatgctccaagaaactcaactttctttggttatcaagatgcagtaaatgccccaactggaatcactggtacattctttgacattcattctgctggttaccgttggcagatgggtgcagactatagagggactggaaaattaggtttcaggaactttaacaatgataccaaagcttggggtgattggggttacatcttctctactaagtatcttccaaatgctgaccaagtaacaggtttaggtactgctgctaagttaaatgctcagacaaccttgacagacgctggtaaagataaactgatgaaggttggtgcttttggtcttgggacaaggggtacacaggttacagctaatgcagactttggtagagactatttaggtaagtatgatgctggtacaggtttcttcttctcagggaatgatatcacaggtgctgttacaacttctggttggaaagacttcatcctgttaagacacaatgacccaacaaatccacaggcaacgtgggctactgccttggaaatgtctcagactggtttaggttaccatgtttgggagaatggtactcataagaaagtcaaagtctattcagaacttaataaacctactgctgctgatgttggtgcaatttcagaagacgttatttggggtaaagtagactccttacaaaaacgttggacagttggagataactccgcaggtggttggtggaaaatctgtgaagtagctgttggtcagaatggtctatctgctgaatttgatttcgttggtggtagagggtttaatggtcaattccaacagcaaggtaactttagaatggttctcagaacatctaatggtacacctgcaaacactaacgaggttggtagagcagaactgtcagtttacttagaaggttcaatcttcccatttgcagagatgggtttagaagaggttagagcaaacgtctatgcaatctggtggaaacctacttcatacgcttatggtacgttcacattcaagccaaacttgggttacaagacttctcaagagttagtatggttccctaatgagggttctacaagtaaacctaccacttgtgttcagccagtttctatcagaagagttctgacaagtaacagtgataaaggtctctttgaagacactactggtggtattggtaagcgtaactggtacaaaatcactatggctggtgagactgaccacggtttctatggtgatactacctatttccagtttattgctcaaggtcagaatgtattaagtttatctaatggtagaatccattcaaaacgttctttagcagtagacttagcaggtgaaacagttgcacagttgagattacgtcctaactctgagaacccttcattcttgattaggaacgatggtggaaacacctacttcatgtttacaaatgctaatgataaagatggtaactacaacaggctaagacctctttacatcaataacgccacaggtggtttaaactttggtgaagcagtttacatgagcaagaacctaactgttgatggtgttgcttcaatgggtgctcaaatcacatggaatccaaaaggtagtggtgtagtgtctcaaacaagagctaccaacctaagactttggggtacttctgctagacaatctgtgtttgaatgctctgatacaaaaggctggcattggtattcacaaagagctaatgctgatgatgcaacagtgctgtttgctatcaacggtgctctgaacactactagtattacttgtagcactatttcttcatcaaacgatatgtatcttcgtaaaggtggtactagtcacatccacttccaagattctgctggtgcagttaaggcaaggattgctggtcaggatactggtagagtcactattgaacatactggtgtagcttcttggtacttccacaacaagatgattcaattagatacaggtggtacagtaggtggtgaagcgtatggtttaattaggggtcaagtacagggtggtgcatgggctaattggagacaacgtgctgctggtttacttgttgactgtcaagattctacagtctctgcacataccatctggaaagctactcattggggtaagtaccatattgctgcgatgggagttcacgtacctaacggcgatattgcaaatgcacaagctaagttaaatgttggtaacagtgaatttaacttctttggcaacggtgacctcaatgctggtagaaatggtaacttcaacgatgtttacattcgttctgataagagactgaaaagagactttacagttattgacagtgctcttgacaaagtgtgtaaactagatggtttgacatacgacaaattagcctctatcgggtctgacaaggttgttggtagagaagctggtatcattgctcaaactttacaagaagtcttgccagaagccgttacagaaagcacagacacagaaggtaacactatcttagtggtttctggttctgctgttaatgctctcttggtagaagctatcaaagaactgaaagaacgtgttgatgcactttctaaataattaattctggacagggaagtccatctttataggagaattgaa

SEQ ID NO: 9 - DNA, 167265 bp, bacteriophage
ttaggccgcaagggccttcatagttttagcgatttgggaaacttcatcatcacttaaagagttgcgataaccgatgaagtcggaaacaatacggaatttcttggtaaactcagcaaccattttatcactattttttgaagcattacgtgataattcatcaaagagattagttactgtccagatatcatgaccgatggtatcttttccaccattaaaatatacaccgcgtaatgaactaaccatattaccaagtcgtgtatattcttcagaaacttcatctgtactgaagtacttcatcataaaatctagttcaggatgcttgataattttatcaatatatcgttgagctgaacttgaataacctacatacttatcataatctacatcatcaaaagcatctacatataaatcacgtaaagcttcaaaaatacattggcactgaccaagctcttttacctttttctgcaaaagcggacgaataacataaaattcattaatgccaataagattagccatacgaatcaaaatattcatagatggatgacaaagcgatgtagtaccatccatagagaaaatatcagaacgatgcatatacgctacataaccagtaatttcatctgcttctgacgtaagtgtaaatagttcctctttttcccatcgcccatctttaatttcaaatttaaatgctgtagcagctttaggacgaggagctttacttttaactacctttggaatatagcttttaactaaagcttcaatttctgacaaataatgaatgttaacttcatcactttcaaacatcgccataatgtcaggaagcaaatcaatctgtgattctacttccggattaataaacagaagacgctcattgtgatgaatatttaaggtgttattaaattcactatcatctaatgcacgtgctaatccacggacaatattaacacgatttttaatattatcaataacaatattaatttttgtcgtattaataccaaacagacgataacttgatgcaacggctgaagtttcatggctttgcttaatgcgtttcagtcgagggtcaagatttacttcatacacaactcctgcattgcatagcttactgtcaggttcaaacatgctctgcattttcttatatgacagatttttagtcgtgaatttgactgaattactaatcatataatctcgagcagaataccccatcttcatcaattcacgatatgtatgacgaggagatgtagattctttaaatcgttttacatcttcattaaatgctttctcactgagttctttaactcgttcaataatatttttacgagtacgatcatcaagtgaaagagcctcgcgagatggagcaatatccagtgaacccattggaaacttaatataattcacttcattgcgaatgcttagccagttacggtctctaataacaccatcgataggataaacgataccgccgtagatagcatataatccaccacgatctggccagtatctttctggatttacaccgtaataatcatcaaaatccggaaaataatcaatttcgcggtcaagaccattaatgatagccaaatctttgaacggtcgcatgatataagaaacttcataagcaaagtttctaaagtctttttcttcaactggaactacgatttcaataccagttttatcatctggacccatttcttttacgaatgtaggtttaatctgtgggccatcaccatccatgtaagctacataaccacgaatttcacctttatgatacgaagtaatactaaacgtatcagtataactaaacggagatttagaacctaatccaaatccgccaataaagtcattagattcggctttagatgaactgaagtatgaattatacagcccaggagaattatcatcaccctgaatatcaaaatcactcatacccggaccaaaatctcgacaaacaaatcgcggatctaatcgtcctggaacttgaatgataaatttttcaggatttccattgagagcatgggcatcaatcatgttggtaatcaattcacggactactgcacgaatcttgtttgtatacaaatcagatgatagaattttaaatactttaggatttgctgcgatgctaaatgcttttgatttagaaccattaccaagaattgtttctttttcagtggtgataatcataatttcctcattaattcatattgcgtttaataacttcagcaacttctagtagttcatctttagttgcggtgtcggattgaattttatctctaatatccttaaagcggtttttaaactcttcggcttctcccatatcgaaaaagcgttgaatgattctatattctcgatgaactgctttatcaaaaagttctaaatttactttatatgatttcatttcaatatcctcatttgcccaattaattataccacatccttgtggtaaagtaaactactgactcatccattctttacgaaggtcagcattatctcccatgagcatttcaaaaagctctttccagttctcaggaagtttaacaacatcatatactgggttttgaatcatctcacgatattcagatttttccaaagagccaagtcccttaatataacggatgctatgtttaggtagagcatctttggcactctcatattcagcgactgtataaaaccattcttgttttttaccgacctgagcgatgattacaggagttttgacgaaacgaattcttccttgttcaaatagttctggccaattactaaaaaatccgagcagagaaggataaatgcttcctagaccatcgtggtcagcatcggtcataatagcaatattatgataattcaagttttcagctttttcaccgagaactaatccagtgattgcgcaaatatcaaatagttctttgtttttaagcatatcagcatatgacataccccaactgttgagaactttaccacgcaatggataaccaccatgaagttctttatcacgaacatcaataagatatccgatagcagaatcaccctcagtcaagaaaagagtagtatcagcatctttaccacaaagattcgctttgatatgtttatgaactttagctttagaagcctttttagctgctttagtttcagctgctttttctgctgccaatttacgggccaaggcagcttcaataattggcatcaaaatagcttcattatttagaatagcgcgtgaaatctttttagcatcaagctgaatatgactacgaatttcgccaaatggagaagtcaaacgctctttagtttgagaatcaaatcgcatgtttttcatatcacgaacaaacataacgatagtcaaacattctttaacacgtgctttagttacatcaattttgaatttacgtttgatttgtggaataaggtcttcacaaatatcatccataacacagtcaatgtgatggccaccattcttagtgtggatgttattcacataagttaattgacgaaaaccatccggtgaacgaccaaccgcaatagaacaattttcttgttcttgaacaatagcatgctcatcatattggcgtgcatatttcttaaaattgccctgaacctttttaccattaaaggtaaattgaatatcaggataaactactgcaagtgtctggagacggtccagtgtaatgtcaagataaacctgagacagctcattagtttcaaatgacataaaatcaggaatgaaagtaacacgagttcctttccattttccaggaatagtttcccaggatttattttccatgccatttgaacaacgaactacaatattattttgaccatcgccagtttcaccgacaaacatcacagaaaaaatgttagttaaactagaaccaacaccattcataccaccggtgacacgttctttatcatcaccaaagttaccacctgcttttggaatagtccatgcagcaacaggaccaggaatttcttcaccggtaggtgttttaaccatcgcttgtggaataccgcgaccgttatcttcaactgttacttgattgtttttaatagtaacattaattttatttgcgaatttaaacttagtacgaataccttcatctactgagttatcgataatttcatcaataagcttaacaagaccaggtacatactgaacactttcccatttaccaaacagaaagcgctcatgcatttcattagcagaagagccaatgtacatgccgctacgctttttgatatgttcaatatcgctcagaattttaatttcattcttaatcatcacttatcctcgtttggtttcgggaatattatactccggtaatcataaagctaaaggcccgaaggccttttatttaaaacggatagtcgaatccttgaagaatagaccagaacacacagttccttctactttctgcccggtaggtccaacagcacgaaatccagtatgttggaaatcattttcagaacaaccgaaccagttatatccagtgatttcaatatttgtaaaaccacttgatgataaaattttagttgcattatcagcatcagtacatcctactaaagatactgctaatactaatgctgcaatagaacgattaatatatttcataattaccctttaagcaagtcgtaaaatccgccattcacatgcttaggagcggaaactaaccgaacagccaaccgatgacaatcaggacatacatcagtatctctttcagaaattttcttgattttttcgtattcttttgcgcagtcttttgattgacatttataatcataaagcggcataattattccttaaagtgagctttcaacatctgatacaaagaccatgcctgttcattattttcaatagtaactttcattacagggaatttagattgatcagttatcggtgcagattcttcctgctcttcagctgcctggtatggattttcaacttcatcaaagaattgagcttcactttttgaaagccaaataaagtcttcatccaaaatatctttaccagaagatagtactaaatttccagtaaatgacataattttaataggacgcccaagagcgtccacatctaaaattttaaaagggtgcatacctaaacgccgcgcatagattccgttatcagtatggtctttaataaaattttcttgagcttgtttatttttaaattgataccatttattaacttcaaatttaatagccattaataaatttccttccagtaagttgtaccgtcttcagtgatttcacggaatacaccataaatcggttgtttatcaccaaccttttcatacacataaaccgaagtcaagtgagtaaacttgatggtgtgttccttttgaactactaccaaatctggatcgaataatacatcttcaaattcgtcattagtacaattctgaacaattttacgtttcattacaatttcctcattaattaaacagtggagcgatgcgtttcagaagagtagcagcacctttggcgaattttacatcatgaaaaacagtttcttcttccgttacaacacgagctttaatgttttcacaatcccaatttttacgaacaatcttcaaaagctgcagtaaatctttacattcagcaatatcgataacacatccacgagaatcttccattatcgcacgatagccgtaagccataccataatcgttgaaagattgttcgatgataattaagttttccattttattctccaagttgttttctgtatcagtagttgatattgatatagtaccataatcaactactgatgtatatagttttatgaaaaaattttaaactttatgcatagcgagctttgctgtagtgtttaatccaactttcaggaatgactttgtatgttcctaaaaatactgcgttgtataacttaacgccatcttctacccattgatcagtaatgtatgcacacatagcacgagtacgatgtttttgaacaaccccttcctcatcttcggtaaattcgaattcataaggagcaatgaacttaatagcctgaccgagtttccacttaaagtctacacctacatgcgaagtatcaatcgtttcaattcctttagcaggaacagctttcaaaaacgcagactcaagaaatttcgcacgaacatagccaaactgaggtttagactttccatctttaggaatgatacgcacttttacttcagaatcttcatctttaacaccgtgtttaagctgaatgcttacaatttcaaccaattttcctgctgctttagaacgggatttatcagatacacgagcaatttcaccaatattaataatcatagttatctctcacttgttaaaaagattttatactccacgggaccattatactctggtcccaagagtttgtaaactattaatttaaaatagctaccaccgcactacgaggtactacgctaaaatcacctgcatgaacaacgttcagaagttcaacaccatcttcaatccattggtctgttacccaaccacagaccgaaataaatggggtcttaatagctaccgcatgagtcaaaaggtcagtaggatcaacttctttgaagaggataagctctgcttcaaaggccatagttttaattacttcatcattatctaagcgatgtgctcgaatcacgtaagctttattcttatcataccaattactttttgaaaaacttttaaccacaaactcgccttcaccaaaaacactagtcagttctttataacctatatttagttcagtagttttaatttcaggttcaaccagtttgtaggttttgccgatttcaatagcggtagtcatagtaggttccttaatttccagtggtttaacagggcatacataagtgcttacaacatcaaaatcaatcagtttagctaccggatttggtgtgtattcaggattataattaaatttcataattatctcatttcaataaaatctacaagttcagcatgggatttacggaacattacttggtgcccgccaatgataacttcatcttcaggaacttcgtatacagcgagataaaatcctttagaagataattcttcccgctcttctcgcgtgaaccatctcatcatatcatattcactagcgaaagcaaaatgataaagagctataaaccatcctggaatatgatattctactccaacataatctttcttgaacttagtattaattactatattagcgtttttaactaatagtttatcttcatgtggtacaggaattcttttattatcctcactatgatgcataaaattaggtctactataacctacacgtaatagccactcttcgctccatgaatctattatactcctgtatggcgttatttgaacacaaagatttcgacgtattgttatagcatcttcataatcaagaatactaaacgatgattcaacacgataaattttcattttattatcctcagtagctatggtgttataataccacaactaaccgaggaagtaaacaactttttatcgttttgttggaagagacagaggatcgcattcttcctctgacggagcatcttcaagacccatagcataccgcaaagcatacttcatcatcaggatgtctttcgcgcagtcatgaatagaatcatgtgcaacgaatccatctaaagttccctttggaagaggacacgtggtcatatcacgaacaagcagaagtgcttcaattctggtacgaatatcacgttgattccagaatttacatggttctaacttaaatgtgtcaagttcattctcagaaacgccgttaagacgctgaatatcgcgaataagatcgactaaaattggaaaatcaaatgacattccacggcaccagccttgagatttccaaggatcgatattatgtgcattgatgtaatcattaaattttgcaataccatcgatggtgcttacatcttcatctgatggtgcaatattttttctagcttcaggtgattgatttttccaccattcgatagtgcttttagtaaaaagacgatgtcctttttggctttttaaatcaaatttgattttaatgccgcgtgaaactaattcatcaaatgtttcaaccacttctggattagagtcaaaagcaattacagccaaatcaataacagctgctttttcaccacttcccattgtttcaaaatctataataaaatcaaacattaaattttcctcgctaaatcgcgaatttgacctacagtataatcttggatataaactttattaataggctcatcaataaattttgccatagattcaatatctttttgtatctcttcaagactgtatactatctttaaagctttttcgcgaatagtaacattatcaggtcctgaattttcttgaatgacagctttaacacttgccataagagatttaaactggtgcaaacttaattcaatcattaataaccgccttataaagatggctaatttcgcctaaaacataatcactgattgtaacagttttcacttcaccgcaaaagaattctaacgcaatcaaatctcgttcaatttcttccaattgaagcattaacttgcctgattcaattttcacgtttttgcgatttttactataagctatttcataaatttcgcttactttatcttggagcagataaaactgatctttagttatttccacgaatagcttcctcaaatttaatcatacataaaacacatcataacgaccacgagtgacaccaacataaagaagctgctgagctagttcagcatctgcataatggatacaaggcgtataaataaaagcacgatctacagacatgccctgagctttgtggaatgttgatgcaggaagtgctttcactttactaaactgtgatttagcatcccaaaaatcactccatggagcttttccgcctttattccaatttttataagtttctgccgttttacctaaaaataagttaaacttatacagctcttcatcagatgaaattattttaatcttttcacgataatattcatcatcgccgtaagtttctactgttaaatcccaatgacgaattagatattctccagaaacaccacgagctttaacaaatgttgatgtatactctgcttctataatacgaactaattgtccgttattaaaaataatttctgacacaggctttccatcaattttatatgttttaattaatggttcctgcattacaataatttcaccgacaataaaatctttatcagtttcaaaaatctttttgcgaataatgctatttaacttgtcaacagatttattcgtaaatgccattacacgattttcaaacaaatcatctagcgatttgacgattgaaaaataatttaccataaaatcgcgtaaagcggtatcaccagtaaatccacgtactccatgcccgtcaacaactttatcataaatccacttaccgttgcgaacatcagtagctacatcaataataggagcattactgcgtttaacttcagtgagttcacactgataaaaatctttatgcgtaaagaacggactgatataagcggtgttttctcctgggtcaacaggtctaatttgcttattatcgcctattccaattatagtacaccacggcgggatagttgaaagcagaattttgaatagctttctatcatacattgacacttcgtcgcagattaatactctgcatttagctaaatccggtacttctttttgttcaaaaagaacgttttcttcatatgttaccgggttaattttgagaatactgtgaatagtactcgcttctttccctgacagttttgaaagaatctttttagctgcatgagtaggagctgctaaaataatgccagtttcgcccgtagatattaaggcttcaatgatgaacttagtaagagtagtcttaccagtaccagcaggtccattaatagttacatgatgtttcttttctttaatagccctcataacgatgttaaaggcatttttctggccttctgtcaaatcatcaaatgtcatcgtaaattccctgcaattggtatactaacaatacgcccagtatctaaaattcgctgatataatctttgtgtgtctacatcaggcttaacatgtttaacttctattttattaaaccaaaatttacgtggagtctcaactaatcttggaattcccttacctaaagctagtcgatactgctctttaagagtagtaaatactttatcagcaatcttccattcaaaaaatacagcaggacgatgttcatcaagcggaactggcgctgtaaatccgtctttgtctcggtaaactatcgcatatacataaaccatattatcctcggataagtttaaaaattgaacaatttagcgggtatcctcttttcagtttaagtttatcaataaaagacaagttttgataccgctctacaccttgaataattttatcacacatatcatattgcatttctgcttctgacaactttttcacagttttccaatcagagcctttaagaagaacgttcaatttaacaacttcagcaccttctgctatacgagaaccatcaatacgagctttgagtgctacaatcgttagcttaatatcagaggtttgttttgatttagaaagctgagaaatgtgttcaattcggttttcacgttttttctgtatagctttaatttgattataagtctttttgattttagcccatttcttttcatctaaatttagtttatgaacttttttcgcagatgaacgaccaattcgcaaagcaaataaatcacgcttttcaatcaactcttctaaagtataatcagaacgaaatgtattatactttttctttactgcaataacattccctttaatgtatccaacgttattatcaaaacgttctaatgataatttctctccttcaatacgattatcaaaaggttctcccgagtaagcgcaaactttctgatctaaaatgttcttaatgtaattgaagtctaagttaaaatctttagaacgtcttttagcagatgcctgagtgtgctctagacgacgtgtaattttacgaatttgattattagtcagtttcatatttttctcacggacgggttaactacttatactataacatttttacttcagcttgtaaacaactttatgaaaaatgctttaaaactttcgtggtataatgaatctaagtccttccattatagattaaatccttcaaaatcaagagtatagatagtgtatgttgaatactttttatactcgtatctatccgcaattctaaatacgcttccagctggtatcattacttcttgttcatctgaaactaattccatattgcgataacgatggctatccggaaatttaaaactcgggctatattctttacaacgtaaagcttttatagcatactcctggaaattaaacaccataggagctttgaattcaaaaataacttgtgtgttatattctaatccagaagcaaagtgtagagctatatttttatcatatgaagctgatactactttatcaaatgtaataatatcaattccttgatttaacacctgcttagtctcaactggaacacctctccaaagaggtttatcgtttggaaccaaacgagatttgattatttcatttaaccaagaatgatcgtctggcttattagtaatacaatgaattaaaagttcaatttcggataaattaaatccttcagaaagtaattcttcacgaatagaagcacgcacagatgcatccattgatttgattttaaaatcttttaattgcattgctgaatatttcattcaactacctcaatatcatacactttaaatgttccaaatgaatcgtgtaatttttcttttgaaatagaagttattttatactttccaattggaatcatccattcttgttcacgcacaatcatcattaagttatcagtacgctctgaatctaatccatcagtatcttcatacgtgtacttaaactcagtattaggagaagaaagtataatatcgctgatatggtcagagtaattaaaagctttatcagtttttaagcgaaatattatttcagtggaatattcaacataagaaaaaccacatgctgtgtgcaaactagtagtaaatgaatctactctgttcgttgaaaacacttctccgacttgtaaatctttaatgagttcttttgtcgattttgatataccacgatatagctgataaggcgatttagttaaatgctttttaacgattttattcaactgctgatgaagagcttcattctttttggcttccatacattgccaaagaattgactgttcaaagtcagtaaatttttcacagacctttttatacatatcatattgaaaatcgacactttcagcttttatagataattgttcaacatctgcaagattaataatcatgatagcctccgtatacttcagaagctatcatatcattgttaggaaggaaagtaaacaactttttgaattattttgcccagggagcccagggcggagggtcaagatggtatgaagctagttcttctagaagagcatctggggcttcaattccataattctgtaatactatacggtactctttcttataatcactagaatcattctggatattcgtagaatgattattttctaacatctcaaataaatccatattaattcctagcgataaaaaccaaaccgacgattagtttcaataatctttctttcttcttcggacattctccagcgtagtccaacatcaaaatgagcccagaccatcttaacaaatgcatttatatctttaatatcttcaataataaatgttttacttttagaaggttgactagctaatttaactttatcgtcttcaaacaagtcaaaaagaccatattcatgagcccttttatagcctttaatagttaaagcttcagaagaagaaaacggtgaatcagtattctgcaaaatatcttcagtatgctttataattagaataacattttctggatattttctttcttttatatctttaattaaaagatccggattttctgctaaaggaataattaatgagcactttttatcaagtgtatttactgatttaccttctttagacataaattctattgaataatgttttgctacttcaatcatgtgatttccttttgcctactaatggaccgtcaggaattttgttttcctggatatatttctcattttcttccatcattttactgccaattttaagaagcaaatccattgcttcatttgctttatccttagcctcttctaacgtcatatctctgttcatgatttatccccatagatgtctctcatcaatttaagcgctgagcgttctaatttcttttctttctcagcactaatcattgatttcatccattcttctgattcgttctgcatttctttatttgcttgttcaacccaaccatcgtcaatatacattgagtttggtctattgaaccattcgagcattttcttcagaactttcatctgttttacctaaaacaaccgtaggagcatcatcaaattcatgaatttttagcaaatttggatgtaaactattccatacagaagaaataaagtatgataaagcatcttcgtccacaattataaatttatttcctttatctattttccaactatatactgaatcgtacgaataaaaagataaaggttcatcattatatttttctgtgttaacattaatgtattctgatttagtaaatgcttcaattgctctaaatggaatatttggtacagtttcaataataccaatctttttaagttttatttcagcatcttctggaactggcattgaaacgaaattttctacgagatacattgggtcacaataacccttatcaatcattaccgctacggtaattggaacgtctttagcaaacgacaaactattactgctaatatacatttcaaacaaaatagcttccataattttcctcaatcacaagatgtagatgaacaactagaatcacaagaacttccgcatgaatcgcccgtccatacatgaacaggaacattagtatcatatgaatcagaactagactgtgtattctgtgcattagatgatgtagtaggtactgaccagcgccaaggatttttataatattcttgggcttcttcataagtcatagtaactgcttctactgttccatctcccatataaacatactcaactacagttaaaggaagatagtcatttgaaataggaactacaccttcccccggagttgtagagaaaaaatctgtaaagaaatttttaaaccaattaaagataaacattacaaaaagcctcttttgaattcgacttgcttctcaccataatcatacctaatctctgcattaaattcaacagaaccatctgcgtacatcataaatgaatgcacaacaacttctgtagaccatggctgtagttcatatttcttcattacatgtcgtgaaatgataatatctaaatcttcatttggtttaatccaacgatttaacatagtgctctcctctataagataattctattataccatactcattttgatatgtaaaccggtaaaatgaaaaaaggaaccccgaaggattccttaaattttaaccaccaatacctggagttggcgtaacagtccaaagaccttcattagcagtgatccattcagtacgctgattttcttcatatactgtagaatatgctgctttttcagaagggaatgtctgataatgagcaccagaaattttgtgaacatcagaataaagagggaaagctacagaaatttctttaccctgaattgtaccaccatcaactgcttggtcaaatgttttgatattaacataaccgcgagtactagccatgtaattctccttttatttaaattacatgattatttataataaattctcgcggaacgttaaaatatccgattttagttaatataacaacatcaccgttaataattaccggagaataatcttctggagcattaaacttccaatgggctctaatattatatccatcagaaccaaatgctcgactagccggtctcccggctttttgccatgcataaaaatcaaatttcattttgaatgctctataattaattttaaggcttcttcgctgacaaaaatttcgtcaggaccttcttctataacccaatcaaccatacgaagttgattagttaagagctcacatacgagctccttgttataatctttaaatagctggtcaatacgtttcttatgggctttcttaagctgacgcttatttaaacgagccattaataacctcggtcttgacgagcgaagttttcagcatttttcaggtaataaagtttaaagatttcttcagctgacattccaagagcaataaatttattcatgaaaaagtgaaattggtcaatcagttcaaatttaatttcaagctgatcttcgggagataaatcttgaattttcttggattgcatttcagaataacgtttcttccaaggtttccatacagcagaagcttctttttcaccattactcataccaccaagagaagtatatagttcgcgagtttcatctgcgatataatcgtcttggtttcgcaaccaagcaagaacttctcctgcggtttcaagtgaatcaggatgacgatttgtttctggtttatcattagccaaacgaatctgtaaatgccgctgcatatcgagcataacctgcagtgggtcaatattgtgcataatattctcagcatatgcacgatttgctttatcaacaccttcgatcaaatgagcacattcattaaagtaagccattatttttcctttcaattcatgggttagtagattaattatacaataaatatataaagcaataaggaggacatatggtacaaaaattaatggcacttgttaatgccataaaaggtaataaaaaacgtatagcttttactatttctgctatggtaggaattttactctggaactttattctatcacctattgcaattgcacatggtattaatattccagtagttactcttgatacatttgtagatttagcatttgctttagttgggttaatttaaatcttagcatatttagataaccgcattttagccatcaacccctgggcaatattatttttcatatattccataatttgttcaggggttgcaccttcctttctaatcatatcattgacatcttttgatttccagggagatttatcccaaaacataaccctttctcctgcatcaactaatttagtcattcgtttgatagtgtcagggtgacgaggttcattatctaaaacccacactcgtctatctttaaatggaacaacttctaggtctaattgaccacccgtaatagctataccattttcaataaaaagtgaatctataggtccttctagaacatatacatcaccatctttaactcgttcaacaccgtaaatttttgttgcctcaggataagctttaatggtgatatatttttgaggagcatctttctttaatgcacgtccttgaaaagactcagcttttccattagcattataaattggaataacaagacgaggctcagaaatttcctttttgtatgttcccggtgctatgctattaactaatttaggccattcggttgtaaaccaaagatatttccatttatcctttggaatacaacgagcttttacatattttataattgcatggtcttccgccagtttatctaatcgaacacatgacggaagagatttaattattttcttctcaggttgtttaggaagttctttaggtttttctactggacgacttttacctttttcttttcttatttcaaagatatactcacgatataaatcaggttcaaactcctttaaatatattccgattggtgcatgatagttacagttataacaatgaatatttccttcattattatcaccataataccatccacgagctttattctggtcggtttttgaatctccacaaacaggacatctaaaccgtaatttaaaagttgaactattatttacttgtgtgaatttaggtaaatgagctaatgcacggtatgcaaactcattatcaatccaaggtattgatgacatttttactcttctttttctttagattcctctttcttctttttaggaatctgttcaggacctttatttactacagcgcctgacgttgttccagtggagatattttcaggattaccacctgaatctccagcgaccatatcttctttaataaattctttaaacgttttcatattagcctctaattattcacctaccacttcagcgatgatatttttattattaaagtttttatcgcaatacagaacataattatactgcattacaccgccagacttaagctgtttttgcacttcagctttcatttcaggacgatcacgctcaacgatattcataatatctgcttcaatttgagtttcaacctcagtctgatctgcagtcatagaccattcacacaaatctttgtcataacccgccatagcaggctgagcagcgcaagaagataaagcaaaaattgcagcaaagataaattttttcatgataatctcctcagtagtttatgtttatagtatctcaatttttaacaaaagtaaacactagtagaagcaaacagacaaattgcaataattggtgatttcagtttcattcttctcctccttcgtgttgatgaacatattctttttcaagtctagagcacaagttttcatattcaactaataaaaatgaatcaagtgcgttatttctatgctgacaccgttcttgtaaagaatccatctctgaacgttgttcttgtgttaataattgataacctgatactttagacattttgttctccgcgattagctgatagaattactataacacaactctatcagcttgtaaactactattttaaaacttctgcataatcacatgttacaaactgtttctctagtttaataattttacgaaagtatcttttgcattggcgaatctgccgctttgtagggcgcacagcaaacttaataaattccactcgaccaaatggagggctttcttctgctggaatatctaataccaattcccacgtatccgcgataagtgctttgaattgagtatttttcctgacgttatacggtgtaggtttaaataaaacgatatgcatattatcctcggcaatccacttcgcatactttcttgtcatcaatgaaagctttaactaatgctttattaacttcagcatattgattagtagcccattgaacgtcatctttcatcattgtgatttctttagtaaacatgctttcattcttaaaccaccccataaaaactacctttaccaattccataacaatctcctcatttaaccaacaagactactataccatagtcttgtcggcttgtaaactaaaattttaattcatttgccaaagcatctaactgagctcgagcggattcgtttctttgatagcgattctgttcagcctgaatctgttgtgaacctgctacttcgttcacttcggttggagtagaatcttgttcaatttctacccatttctgatttcctttttgaacacccatcaaaaacttattccatttattcttatcaccatatcgtgatttgatttgcttaatgagttgttgttcagcagctgctagctcctcggtttcaatgaccgcaagcataaaatcggctgttgctggaagaccggcagattctgcaatatcgctcatgttaacatcagaagagtcccaagcttgcttaccaacctgtgctgcagtccaaagaacagtttcggtttcaacagccagagcacgcaattcctctgcgatagctttaacagtcgtgtaactattttctgaataaactctgatgcggcaagatttacaaatacccagatagtcaacaataatgattgttggaacaaaattcttcttgagctttaattcatttaaaagcgaccgaaatgtattagcgtctgctccaccagtaggatactgtttaacgattaaacgaccgagagtagatttctcacgccatttttccatttttcctttatactcagcgtaagaaatatgcccatcatcaatgtcatcaagagaaacatcaagcatgttagcatcaatacgtttagcacagacttcttctgccatttccatggaaatgtaaagaacattatgtccgagctgtaaataatctgctgctaatgaacacaatcctaatgacttaccaacgttaacaccagccattaaaacattcagtgttccagtttcagctccgcctttagtaattttatttagaattttgagtttaaatggaaccttacgagctttattcatataagatagccaacgtgcttcgtagtcatccatccaatcatgaccaacgtaactatcaaatgaaattgataatgcttggcgcatgatgtcaggaatagcaccaacatccggcattttcttatttcgtttttccggaggaagctcagcattagtttgaatttcaattattttagatgtggcgttaaacatcgccctttgctgaacatatttttctgtttcttttactaaccagctgtggtcttccggagaatcggctagtttcgaaataagtgtttttacaccagaatattctgtttcagtaaatgaactattttctaatgcaacatttaacgcattaatagatggaacgctatggtactcattaacatgagatttaattaatttgaatgtatttttagctggaccactttcaaaatattctgaatccatatatggccaaacttttgaaaaataagcttgatcaaatatgagatgagaaagaataatttctaccacacttactccttaaaagaatttaaattttttctttgaccttttattaaatgcatcttgtagttgcattgtaatacatttttctacatgaggagctaactcagcttttctttcttggtcaagaacagcaaagtccattacgacttttccatcaacccaatctaattttgtcacatacacaatgtgtgtagaaccgtcttctagtttaatgacaatctcctggataacattttccatggcagatttaattatcttaagagattcattaaaaagacgttcttttctttcttcttccccctccgaagagggggattcatcgataatttctagatctaaatctaaatcatctttattcattaaattcttccatatcacttaactgatctaggtcagtttctaaatcagctgctgatttacttttactttctggagatttaaatttttcaacctttgagttaatcaattcatcaacttcagcttcaacaatttcattactatcaatagcacctaactgataagcacgtttaatagcgtctcggaatggttgatgcttaaataaaggaccccagaatgtagtgcagttggtatcttttgcacgccaagatttttcttcgcgaatcatctcgccggtttcttcgtcaagaaattcacgagcataccagccatttttaggttttaccacaaatcctaattcaagagccatatctaacaatccagaataaggatcgataccaccgtcaaatttaacatcaataaagaatttacttttttctttaacggtacgagatttttctacatttagaacaaattgatacccctgaagatcagaaccatctttaatctggcgcttaccgataatgaatacggtatcagccgaatacattacgcctgtaccacctgtcatcacggttttactaaacatttcaattgtttcaattgtatggttaaccgcaacacatggaatatttttaatgctaaaataaggagtaacaatacggaataatgacttcagtgatttagcacgagtcatatctgccacagatttttcattcaaggcatcttccgtttctttcttagaagccatattaccaattgagtcgatgaatacaataactttttcaccgcgctcaatagcttcaagctgattcaccatatcaattttcagctgttcaactgactgaattggtgtatgaattactcgttccgggtcaactcccatggatcgcaaataagctggagtaataccaaattcgctatcatagaatagacataccgcgtcaggatatttgttcaaatacgccgcaaccatagtcaaagacatatttgatttaaagtgtttagaaggacctgcaaaaatggttaaaccagactgcataccaccatcaatcgcaccagaaatagcgatattaagcattgggatttttgtacggattacatccttttcattaaagaatttagatgtagtcagttcagcagtcattttagaagtggaagctttaatcaaacgggattttaaatctgcaatagacattcattttttccataggtaacattatattttcctcactggttaaagatagagtaattataacacaataaatttaggcattaatcaactgctattggatgaatagcattaaacttatgaaatgcttctgatttttctttgcgtgaaacacacatgcgaagaacctttaatggctcgtcttcttcacccaacgattttctcttttcgatattcgatgttttccaacgagcttgctctggaaactctctattgatttgctcaagagctctattatgttttgaattactacgaattgaactacatccgccaggagcttgtgcttttccagatacaaccagatatttgaacaaggccaaatgcggatatccttgattaattaaattgagaaatgcatacatatcttcgcataaatcaatttttccatacccaatttgttctgttgtaagtttcccgaggtcataccaagtattcgtgaatccatatgaattttcacgataattaccccaagatgaagtaattttaaaaataggcagacgagcatgaccatgataatacccgcaatccatggcatcttcaacgtattgaatcaattcatagaactgttcacgagttaattgattaattttatctacacagcgacgatcatctttctttcgcattgaactcatacgaatagtagtatcatcatcaatcatccagattcgttgacctgcatacatatcagtaattgctttacgagtaccagcaattccattaacatcatcaggaatagttataattttggctttagacccgtaagcgtcataataagctttttcttcgtgttcacgtactacaatatgaggttcataatcagtcggaaacatatcaagggcagaaactgcccctacgcgttgatagcttggaattacgaattgaatcatttccactcaccattataatcttttttcacaatatgagtttcgccagtattccaccaatgatcaaccaagtaaaaatgacgagaatatacatgaagacttccaacattccatataatagaacctgctttatactgacgagttgaatcacctgcattcaaatcagatactaatttatctagtacgtatttttgccatgcataatcattacggaatccgaagacaacgtcatttgaacgcatgctcactactgcattgactttcttatcacgaatcaggtactgtactgtattcgtacacatgaaatctgacataccatctttattgtagtcaaactgcatggatggacgagtataaatcatgataccacgccgagaatcaggattttgaccaagttcagctaaacacatatcatactgggcatagttatcttctgaccagatggcccaaccataattcgagttaatttcgcctttagaagatgctacctgctgccaaatcttcggtgtttcacccggaatatctttaacaaacaaacttttagatttataccattcaagttcacgttgaatgtattcatcattaagagcgccaaaaataaatggttcatctgctacaaatgatgcgccaataatttcaatagttttaacgccagttttatcaactacgaaatctttttcctttaatgcaagccccaaatgaagacggatttcttcaactgtcatagagtcactaatcatttaaacctcaattgatacattcatatttaacttgtaacagtaataaaccccaacctataataagtgtcggaatcatacaaggaaccgttacgctatagtatatacttattataatcatcaagattaaaagcaatactgctaaaattttgcttttcattccttctctctgatgataattacttgattcggttgtgcagattttttagtttcacccgcaattgaccaaataaatgtaataaaccaaccaataattgaccaattaaacagtaaagatgtgaaaaagattcctactgtcgattttgacccacgcatcaaggcgatgaaccacggaagcatgtatataatgatagccaacacgcctgaaactaaaaccataaaaattgaacctgctactaaagtttccatgttttcctcacttagtcaaattttttacacatgaattataagaattcactacatactccatcggagcatttttacctgtacgccattggtaattattagcccaattagcccaaagttcggcgcagtagttttcaattttttcttcgcgtgtaattacatctgaattacgatatgcttgagcagattcatctggacgaatagcttcgtcaaaattcgcctgcatttgttctactgtctgttttggagcttctttataacacttgacgttaggattataaaatttgcttgaacagtttacaatttttcctacatcagattgatttactaccggtccttgagctacacagccagtaagacccaatgtaataaccaaaatagcaattttcataataatttcctcaaatacaagtagtaattactccagtagtgcttacacaggtattacctaattgaacaccaagcgttccattagtattcatatgaagattatcatcaatttttgttgatactttaccattcatgtgaataacagtattagattcaatcacattctgagtgtcattttcaatatcaataaatggaacagctgctaatgcaactagaacaactgctaatgcaactaaacacgctgctaaacaaccataaacaattttcattttattctccaaatccgtatcagttgatagttgtatagtaccatggaagaacagggatgtaaacggttttgtgaaaaaattttttaatgaatttacaggacctagaatcatctgtttttcataagtatagatttatattacttgtatgaaaaagggacccggaggtccctagatttattctatcagccaaacaggaagtctaacgaagctttttcctcatagtccatacccgccgattcacacatacccgcaagcggtttaacaaacgatttttggaacaaagttgagtagtcaatccaagacagtacatcagaacgaatttctttcggaagttctgtgcccgacggccaagcaatgcacttgtcaccaaatggatttccttcacgtaatggaagaaccattaccttatttccatccaaaattggagctacacctaaaccgttaacagctcgacgataagttagcacaccacgaatatggaacggacatttaaatcctggccaacctttatcatcatatttcgctatatcgttcgcagtttttacttcagcaataactttatagtcaagttgacgatattctttctcaaagttcttgtagtattcttggacagactcttcgccttcctgaagaatacgacgaatactttcttcgagagcttcttgtactgcttttggtgttgagctctgctgagtttccatacccatgatttttagatgtggttcggcaaatcgcttatcttccatatcataaacgttcagagcataacgttttttcgctttccaaaatccaccaacaccctttgaaccaagcggagggcaagaaatagcttcacggtccatatgcatcagatgctcgcggttattcatataatcacataactcacgatatgcaacatcaatcataggttccatctttttcttaccaaactgattcatgaattcaactaaatcattttgttctttaaagcgatcaagacctactttttcaataactttatctacacaaacatataccgaatcagtatcacctgctgcgatgaaatcttcaccattagttccacatactttattcagatattcattaattttgcgagcaatccactgaataccgacttgaccgaaaattgtgatagcagtagcatttcgcaaatcatagtagcggaaatgaatattaccaagagcaccataaagactgttaataagaattttacggttcagctgatttgtgttagcaagcgtagctgctttttcacattcttcaatcagactgttaagaacagattcggtgtaattcgataattcgtttaagaaatcatcattgaacttaacatatcgttcaacttctggtttagttgagcaagaccctgcacctttcataataatctttttaatagcttcggcattcatttcttccgcgaacattttctttttccaatctttacgctggaaaaatactttagcgatttcctttggaatgataccttcttggtgcttatcatacatccatccattcggagaacaagaatattcatcacttggcttaggagctgttcctgcgatatattcatgaattggatgaactttaaactgtccacgaatagtctcaggactaatgttaacctgacgaataatgctaggatacagagacgtcaagtcaaaactcataatgtatcgacgagcaatcggtttaggttcaaacacaaatgcacccggaaaactctgtttaacgtgcgaaccttgttgaggaataaccttatgttcacctttcagtgagttaaaaataatagcatcccaagttttaataggactcattacaccagaaaaaggcattttagcgtaataagacatacttaaaactagatctataaacccgcgaattttatcaattgcttgaactgattctacgtcaatgatgttataactaatgtatcgttgatgattagtctcacgaagtttattaataggaccatcgtacggcaatttaccttttttggtttcatgttgagcaactgattccaaagagaacgatggcaaattagtaaatgcgaatttcttgtacaaatctaaataatcaagaatagatacgccatcaatagaataaatttctttgctaccgtacatattttgaattagtttagattttactcgaccgattggagagaaacgtttcatactacgttcaccgagaaccattttaacgcgattcatgatatacggaacgtcaaatccctcaatattccaaccggtaaaaatagcaggtcgtttctgttcccagagattaatatattccatgagcatatcacgctcattatcaaatggcatataaattactcggtcaagaatttcttgaggaacttcatcgccaccttcacagtcaagcttagcagctaactttgcatcccattttgatactgaaccgtacattgaattcaacaaatcaaagacgtaaaaacgatcgtcaattgaatcataatgagtgatagcatcaatttcatattctgctttcattgggtcaggaaatttatcaccagtaacctcaatgtcacagttagctacacgaacaaattttcggtcataaacaatttctgaaccatatgtatcactgatataagcgagtttaaaatcgttcataccgagagcttcgagaccgatgtcttccattcgcttcatccagtctcgtgcatctttcattgatggaaatttttgaggagcacagtttttaccataaatgtctttgtattttgactcttccttacaatgtctaaacatagtcggaagatattctacttcacgagtacgttcctttccattttcatcaatatagcgctcaacaatgttatttccgactgtttcgatagagatataaaattctttcatagatattccttagtttatagcccgagttattaggctcttgatatattatactccaaataaggggccgaagccccttgcttaattaccaatcgtatatttaggaacgagtttccattcatgtttttgcttaaaagaaataactcggaagttattggttaaatctttcataaaagttctttgaccaggaacgatttcaatcagtccccaatcttctaacagccacgcaatcgaatcacgacgaacttcatcttcttctgtcatttcaacctgacggccatccatacgaagcatttctttaaaatggacgatatagtatagtccttttttctgaagaatgtggcaggactgatacagaactttatctttattattagcaattcccatacgagtcaaagtttcttttactttcagaaaatcttcaggttttttaagagtaatttcaatcattttaccattccaatgctagttttttgagttgtttctgttcttttacattcttagtcacttcttttaaaaaatcatccgtgactaaaccttttagttcttttaatactaaaggaagttttccatttttagtaagaattgatttatagttaattgcatcatttgtattaacttgataccgcttagcaagtaacttaataatcaatacttcggtagaatcttcgaccagttttgcccatttaccatatcttttaccccgaggaacagcagccatcagataattaaaatgggcttcatcgcttaaacctgatccaattaaattcatcgcatatacagctggcatgcattcaggaaattgtgataatgcattctcaaccatgtattttgaataatctttttgagcaatagagcatttagttttattattaatagctccaattatttcaaaaaattcattttcagctttttccttaaaagaatcagcagcagattggacagctgtccaatcttttgaataccaagcaacttgatgctcgtttaattgaatatcatcttcaaataagctcatatcacttccactgcatttcgcatgctaattgaatgaaaagatatgctaaatgtaattccgtattagccgcaattccatgatactggttattttcaccaacaatttcatacatacgaataatactttgcggagttacgcgtgtatagatttcttcggcaagtttacctacgaaccacgaataatcagctgcatattttggtgctaaagctctgagctgtttaacatctttatttttgagagattcaagaacatcatcaatagcaccacgatcgttagtaaccagtgataaaataccagcatccaaaacacctttagatgaataactatcgagctcaccaatagttttacgaaaatccggaaaattctttttaaccaaagctgctacaactttcatatcagctatagcaattccttcatgcttgcagatttcagtcaatcgacgaatcatctgcttcatcatttcaattttatcttcatcagtcggttgaccgaatgtaataactcggcagcgtgactgaagcggtttaataataccatcaatattgttagcagtaataataatactacagtttgaactataagcttccataaaggaacgaagatgtcgttgagactctgctagccctgaacggtcaaattcatcaataacgattactttttgacgaccatcaaatgaagctgcactagcaaaattagtcaaaggaccacgaacgaaatcaattttacaatctgatccattcacaaacatcatatcagcatttacatcatgacacaatgcttttgctacagttgttttacctgttcctggagaaggagaatgaagaataatatgtggaatcttacctttacttgtaatagatttaaaggtttctttatcaaaggcgggaagaatacattcatcgatagtagatggacgatatttctgttcaagaatgtgttctttttcatttacagtaatcataatttcctcattcaagttttagtgtaaatttaagggccgaagccctttattaaaaatcgtgcgtagaatcagcttcaagagctactacataattcgcgtgttcaccttcaaatttagcagcaccttgtttaccttttgcccagagcagaagtttataatttcctggttgcattttcatatttgccatattgataatgaaattaaatgtattttcaccatcataatcaccaagagtcaaagaatatttaacacgggtcaaagcagaatcttctactttattaaaaccgttaattacgattttaccttcttttactgtgatagcaattgtatcaatctgcagaccgcgagatacacgcaacagctgctgaaggtcttcagctttaatttcagtaacaacagatgctaccgggaatggaattggtttattaggagcaactactgtactcggatcggctgctggccaaaaaattgttgaacgagcatcagcaattttaatatttccatcttctgactgggaaatttctgcatcgtcattaactaaggacagaataccgagaaaaccgttcaaatcgtaaattgctacatcaaaatcaatagtgtcagaaatattagcttccgcataagttgtaccattaactgcgcgagtcataataaattgaccagatttaagcataatgccagagttaatagtagcgaaatttttgagcagagcagtagtatctttagacagtttcatgtaatttccttcaattcaaatgagatttaattttataactaatttaataaagcaattaacgattaaaatcggcagcaattgtttccgcaacaatttgagcagcaacaattagacgttcatctgcattaccgcaataatcatcttcaaggcgttcaccacatgaagtcataataaatttagcaccagcatttaaagattctgtcgtatgtttgcgcattagttcaatccatttattacttacttcacgatcgatagcttcataatacgcatgacgagcaggtgcagatttaattttgttctgaataacttccatcgcgttatcagaaagagacaaaacccatgctcgacgaattttattttggttttgtggatttgattcagaacgcacgtgttttggctgaatatcttttacatcaacagtataattcacagtaattttagtcataatacacctttagtcataataatcagtaacagtccaagcttcatttctgttggacattattttcgtatattctgatttaaatgcattcttaagcatagattcagtaactatatgctcttcattagaaaaattatttctcagaatatatcgttttatttcaggaatagttaatagatgctgtccagttgaatattccatgtttttcctccatagagattatactctaataaattaaagcataatctctaataaattaaaccattacagtaaaccgaccaactttcttcatttgaagatgctgaccatatgcttgtgggtcatggtctctatgcgaaataacaaaaacattagtattttttaaactatctaaaatagttgaaatagcttttacaccttcaacgtcggtcgctgaatcaaaaacttcatcaagaattagtgtgtttattttaacacctgaaactttttcagcaatatcacgccaagtaaataaaagagcaatatcaattcgcgctttttcaccttgactgaatgaagcataactaaaatcttcacgaccacgggatttaattgtctcattaaattcttcatctaatgtaaacacataatccgcttccattattttaagataatggttaatctgcttattaaataatggaatgtactttttaataatagcacctttaataccagaatctttgagcatatcagtcaaaattcctcggtggtatttttccattactaaattagtttttgtcttaacaattttatcaagttcttcttgaagcagtgctatttcatcagcatggtcaataaactcagaagatgctttttctatagctgctttaacttttttagctttatctactgtcgtgattagagattgctttttattgcgaatatcatttgccaacgactgttgggttttaatattatctcggtattcatcaacaagaacttttaaattatcacgatgtgttgaaagctgttcaaatgaatgcgtgcattcagaaactttatctttaattttagaaacaactttatcaccggaacttaattgtgacaaacaggttggacataatccaccttcgtgatacatattaataactttattatacgagtcaatttttgatttaattaaaaatgcttcttgaccgattttattaaatgcatcagtcgggtcttcatccaaaacaatactaactaatctttcattagcttcttctatttccgattttagcgttctagcttcttttgctaaatcatcatacatattctgtagacgagtaaggttatcaccagttaattttttctggcgttcaacgttatcattatatattttaatttgctggataatactatcttttttaacatcaagcacttggttttgtgaatttaattcacgtattagtgctttattaagtttatccatttcagctaatgttcctacctcgagcaggtcttccacaagctttcttcgcgcaggggtcgacaaacccatgaaaggggtataccctgctgtaccaaggacaacaatctgcttgaaactggcatatgacattccgataagctgttcaaattctgcttggaaatctttactgctggcagattcattaagacgtgtaccgttaacggtgatttcgaaaacgtttggtttttgtcctcttttgatatagtactttttctcatcatattccatccacagttcaactaaaagttctttcttatttgtgctgtttattaattgacctttctttacatcacgaaatggcttgccaaaaagcccaaatgtgatggcttctaacatagtagacttaccaccgccatttcgtccagtaataagagttttttgaaccttatctaattgaatgtcaactccattttgaccaactgacattatatttttatattttactctattaagtttaaatgatttcattttgtatccaattgttcacaatgaagaaaattctttaactaaagcctgtaatgaagcctctattggatatccattcttaactaacattttcctaaacatcacatgtttaggacgattatatgatatccacaattcatacaatttatctttattatcccaatgatagccttttcgtctagatgctatatgagcttttctaatctccggatttttccaactagcagctactgaatttgatatagctattttatattcaggttttgataaagcagcacgaacagccttttggtgtttaattttattttcttcgttattaaaccattcccttgaagccattgaaattttttgttttgttttaaaattatttaatctttctttgttatctttcctattttttgctactgaaaaatattttaatgccctttctctagcagcatttctattttgcggatttgaataatactgttgaagcctttttgatattgtgtcacttacatcttgttttataaaactatattcagcagctattaaatcaacttcggctaaagataaatttttatatgtttttcctgacatcattctatttaaagcatttagcatttttccatttttaccttttgctaataagaagtgtgctttaaaatgattaaaatgacttaaattaactaaattccatgtagattttaaatattcaggaaatattgatttaggaagcacgtggtgtgcttccgttttacctggagttttaacagttgaattcatagaaataaaattaatgtaagacttggcgtcttcttcactcaacgctaatttttcaactaattcctttattaaaaattcatcattaatgtcaagtttaaaattcttcacaaaagattccttttaatgtatcttttagaccattctatcatatcatcataatctaaaaagtattcatcaaattcagccatgcaaacaacgccttgtgctgcttttgatgtgatataaattattccaacatatctagaatcttcttcggtgtaatcaatatttgctatgaattcatcattaatgtcaaatgtcaaaaacttcacagtatgcatccttaatacaagatacagccatatcttgtaatgatttaggtgtgtcattatctaaaatgttgaagttaaaagatacagcccagtcagtgcagactgtaacctttttaatacaattatcttcaacctctaacggttcaaaccaatattcaataatttctttatgcccaatatcatcttttacttcgcattcaaaatgctgactcatcataacatttttaaattcatcaaaagtcattgtgttgcctctacatatagctggtttgcatattgaataagtgcttcgcgatcagaatcagtgatgtctggaattgcattaatgtattcttccatcaatgtctgaagagattgaacttcaacttcttcactatcatctgactcgacagagttatcaatctttgacacaactcgtaatgaatgcacaactttttctagttcagattcgaacttcgtcagatttttgtctacttcagttactataacacgtactgataaatttgtaaaatctttatagtcaatttttcctttaaatggataatgaattctacgatgccaggtagtattgtttggaataaattccattcgttctgtttctgtatcaaacatccagaacccacgagggtcattctcgtcacctgcagttagtgtccatggtgtcccaatatatctgacgtttgcagcctcagaaatagtatggaagtgaccagaccacacctctttataagtcttaaggaaatcaggttcaagaccgtgagatttcattcctttataaaaataaaatccattcagttcccagtgaccaacacaaaaagaagcagatgaagttttgatgtgctcaagaatttcaccagtattttcttcacacatccaaggaattaaatcaattaaacatccgtcaaaatctactgtagtaggcttatcatatactttaacattaggatatttagccaaaagctcagtagaggcatttggatgcattacatttttgtagtggagatcgtgatttcctacaatagtatgtaatgtgattccagcgtcatcaagcatttgaactatttcacgggcaaactccatagttttatgtgtgattgcttttcgcacatcaaaaatatcaccatattgaatccatacagtaattccatttttcttagaatattctatcgcttgcttaattccatcaatttgaataccgcgaatccactcatcatcagctttaacgcctaaatgccaatcacctaaatttaaaattttcatatatcaagaaccgtcattgaaatgcaaaataaaattattgaaataaacccatctggtgtgctaaagaacccaatccaacatgctctagtgaatagataaaatgcgagaaaaagtatcacatatccaagaaatatcattatatcaaactccgtataaagctaaagggccgaagccctttattttgtaataatgtcaaactgttctttaaagcagaagcttgaatcttgatgctgatacaaaaattcataagctttttcgcgttcacggtcataaagagctcggtcagatgacagttctttaatacgctcaaatgttgattccatgtcattttcatcaaaccaaacgataccgctatcatgagaaattaacggagtattatcaacacggaattttaaattttcgccagtagatttccaaaatactggaattgttccacatgcgccaagctcgagatgagtatattctaaagaacgttgtagatattttttgtccaacttactcagctgataaccaaatccagatttactcatgcgttcaagcatttcgctatttacataacggtcaagaatttgcgttggcaaattaggagcaattttaatttggtctacttgatgaagacgataatactcgtatggaattcctttttctttaataggaatgaacgctggagaacgttccagaccttccataatagtacttagcccagcaggtttaagatgtttttcgtgaaaatcaaacatctgataaaaacctttccatgtagtcgtacgaccaatccaacggttgacattcatgttaatttcagaaacatctttccagtaggttgatcgaaccttcgcaatatccataggaggctgaaagttgtatacagtcggtgcttcttcaatatcatcaaacagagaaaccgtttctggataccattctttcatcaaaactttattaaaatcgccattatcagaatgactaaaaataacatcagctcgacgaacagtttcttctaatcccaaatttcggcgcaaagaaagagaagaatggtcatgttgataaactacaacacgaactgaaggtttaatgttatcaataatttttttatagttattaatagtgtcttcttcgactgaagtagcaggaactgaattgataattagaatatcacaatcatttaccagcttaagtgttttatcgtattcttttgccaataaaaccggaattgaaaatgatttataatcatgcgcgcaattacgagtaaatgatttatctttagcataaaccaaagttacttcatgaccatttttaataaaccaatcacgctgctcgagagaaaatttagttacgccgcaaccttcaagacctcgagccataaaaatacatactttcatttaatatcctcattgttttggtttattttaccaaaaatttataaagcaatataggagccgaagctcctatccgcataatacaccatacagaggctcattagagcttctaaattttatacgcttatatgttatagttccttctgctttagctttatcatgagactctttaaagcgtctcatcatttctactttagaggaacgaattttattataatctatttcagaagtctgggtgttcatctttcacagttgccaccattttttgacttgataggaatcaacccacactttcatattagggtctgctcttacaataggaggattaacttctttaattgaactatcgtggtattctttttcagaaattttcacacaaagatgaccattcaaagattcagtaaatcctgcattaattttaagacgcttgaattttacgtgtgtaagcatcaatcatatcctcaatctgcgatctagtagtcttccaaagaatactaatgagttcatcgttatatggctgttttagaatatcccgacttttcttgatagcatattcgtattgagcaaaattattgttttcagctgcaatctgagcgtgcttataaagacggttcagttcgcgtttgtttttagacaataacttatttgcttttctttctgcttcaagacggttcttttcttcaatagaagaaataagcttttccacttcatcattaatttcgggtttatcagtcatattatttctctaatataaaataaaaatcatcatctgttaaatgataccgatagtttaattctacaccattagatttaaaagcggtatcatacggattttctggatcaatatcaatgtcaagagctaaaacttccctgagatacattttaagtaaatagggaatagcttcaacttcaggtatttcttccaagaatccggagaggttaatcgttagcctcatataaaaaatccaaactaggagaatcgtctacaacacttttcttttcagcccccggtgttctataggttgattcttcgtaatgcgtcattttatcgtagatgtcttgaataaaagtttcatccactaacgcaaccatatcgtcgtcacgactgtcatagacattgtgaacgaagtaactgtatttctttgcaacttccttacgttcttttttaatacgttggacgaatgcattaaaacaagcttgagttatatatgcatgtgggtttttatatttcgtttcatcaaaattatgaagccccttaatagaagcttctataccatctgcaatcatttcttgtttccaggattgggtgtatcctgaaaagttgaaacgtttagataagccttctgcaataagcataatggctaatccgatagtatcattctgacgaactactttatttgggtctttattatttgctaattctgttttccaatcaataatagcttgtaaaagctctttattgtttacgtaattatatttaggcttagtttctgacattttcacctcttagctcaattcatagatctattatatcataatatttgaagatctatcttaaagcatagaggatataaattatctaagtaagcagtatgcttggaacactttttccatcatctttttaaattcatgaatatctatgtaatgactagttaaatcagcatgatataaaaagtctaaaaacttttcatgtgtgctagcatattcactttcatttaattcagaaacatggctttcccaatatccaacaccagtcttatttgggaaaaatgaaattttcatgtattgatcaacatagaaaatgccataattttcaatagtaatagaaatattaataaatttcatacattcatcaacttagccgcttcaagagctgcatctagtgaatcaaactggtcaacgtattcaatcaattcgccataattagcgtataaccaccattggctaaattcatactcaaggatgaatccatttccttcaatttgagttaaaccaatgccatttgtatttacttcatatccggcaagacgtaaatcgttaataagagcttcgttcatattcataccttagcaattttcaggtcagcaaattttttcttgcgttgatttttcatacgacgaatagttttatcggaaatttcatgcttttgataagctttagattctacaccaaaagctttaacatcaaattctgacaagatatattgaaccaacaattcgcggacagtattgcgcccaatcttctgatcattctgtttcatcgtctgatgaagctctttttcccatttatccaaaatttgaggagttacaatatcgcctttttctagcaaagaaactactttatcatatgcataagaattgatggcgtttttaatttgaatagtcatacattatcctcaattacattaaaattttattatccaaaaagggccgaagcccttagctaaactgtttggcacccttccagccttcatacatcattgcggctgatattaatattgctcctgcgcattttgaatatttgtgattccaaaaccagtttagaaaaacttcgtcatcaataccttgggctatcatattttcaaagaactgacgacgagattcagcaattcgttgcgataatttagattcaggattcatttaaattttccagttaccattttcatcaataaatttaatccaatcatttactgaccacttggtcgtatcgccttttggagcaacatttaaagtgtataatccttgtttaaaaagcatgcgtttgatattcatattttcctcagctataacgataacactcgtttgatttacgcttagcaactcgttgagaagtattgtaatcaaaatcatcgtcaatgtaaactgattttttcaactttcttacttcaccacgtaattggcgatttagctcatctttaacttctgaatcaatgcctttcattctacgccatttatctgagcgaaaaatgttttcgaccatatctttatgacttacaccatcaggagctttacgctttccgaaatagtcataatcacgaacttttaagtctttacgacgatacgttttacccatggagtttaatttccttagcaactgaactaaatacggcacgatcgcaaatcatctgtttattccatttaagtacagtataatgaacatctagatcatctactgctgtaacaataacaatatgtccgttaacacgataatactgatcccttttaatctctttatcaaccatatcaaatcctcaaaggcaattcatatgttaataataccacagtttgaacttgttgtaaacaactttgtgaaaattattttagggaatgataagaagggaacgatagcttagaatggtaatatatagaatgtgagaaagaaaggcccagagggcccgtcttaatcttctatgatatctctatcatatccaagtgaaatgagagtttctttgaagtgtttaatgttcttttgtctagaatcattgatgaaaatgactggataacgaatgttaagagatgtgaatccagcgcgtttagcaagagatacaatcagtggacgatcatactcaatcttaccattatttgtaagaactttatagaaagtaaaaggagcattgagctcctttagaagttttgtaactgattgacatccaggacaacgacctacttcatctggaattccatagacttcaatcttgttctgtttcacaactattccttactaagagcagcattcagcttattagtaattttatccagacgctcattgaactcgctagaagacagtcctttttctggagaaatcaaactaatcacgaaaaatataacaataaaaggaataaggaaaatagctccaactgccataaacaaaaagaatgttacggttgtaagaaaatcagctaaacctttacgaaatttatacatatttacccttaattgattaaccaagcattgataagcactaaactatattgcgaataaaattctggaccaaaatgaaaaatcatatcatttatagtgtccataatataattcaatttaatcatgtttccacaccccatcggtatttgaccaaagtcgctgattatctgatcctcgccacagctttttggtcggaagatttttctcatacttcccatcaataataacatcaacatatttaagcatttctagttgtttaatatcttcaaatttatatcctgtccacaaccaaatgcttttattgggataaagattttttactgtttgaacaatgcaatgaacaacatctcggttatcaggatagagagggtctcctccagttatagttaatccttctatataatcattattcaaacattcaattaattgttccagtgtttcacccgtgaatggaacaccgtttctagcgttccatgttgatttattataacacccttcgcatttatgcaaacaacctgtaacgaaaagaacgaccctgcatccagggccattcacaaaatcgcaaggataaaatctatcataattcattggtgtttaaccctatgcatgatttctttatttttgccaagattaaatccgcgttcattcggatttcccaaataaccacatgttcttcttattgtgttcatctttttaggatcagtttctccacaaatagaacaaacaaacccggtttcagtaggagtcatttcatgggtacttccacacgtaaaacatttatctactggcatgttaacaccaaaataatctaaatgttgtgcagcataatcccatacagcctcaagaccctttaggttatttttcatatcaggaagttcaacataagaaatgtgaccacctgtcgcaatgaaatgatatggtgcttcgcgagaaatcttttcaaacggagtgatattttcttctactgaaacatggaaactattagtgtaccagcctttatcagtaacatcctttacacttccatatttttcggtatcaagtttacagaagcgatagcacaggttttcagcaggagtagaatacaagctaaaagcaaaaccggttctttcagtccactgtttaagacgagcattcattttagtcaaaatttcctgtccaatatcacgaccgacaagaatattcaattcgtgaataccaatgtatcctagggacactgaacttctaccgtttttaaataactcaattatgtcatcatcaggtttaagacgaaccccgaatgcaccttcttggtaaagaataggagcaacagtcgctttaactccttttaaggaactaattctacacatcaatgcttcaaaacataaatccattcgttcattgaacaattcaacaaatttctgttcattgaattgtgttccaatataagaatctaacgcgatacgaggaagattcagtgttacaacaccgagattattacgtccatcaagaatttcattaccagtcgaatctttccatacgctcaagaaactacggcaacccattggagaaacaggaatagatgagccggtgatagctttattgttcttagctgaaataatatcaggatacatccttttgcttgcacactctagagcaagcagcttaatatcatagttcgggtcgtctttataaagattaacaccttcttcaacgaacataacaagcttagggaaaataggagttatcccatcacgaccaagacctttaatacgatttttcagaattgctttctgaatcattcgttcagtccagtcagttcccgtaccaaatgtaattgttacaaaaggcgtttgtccgtttgaactaaagagagtatttacttcatattcataagcttggaatgcatcgtatacgtctttttctgttttagattgagcataattcaacgcatcagcgatttgccatttttctgcatcctcaatatgttttgcataggtgcgtttaacataaggagaaagtactttatcgacattagcaaatgtagttccgccatattggtgagaagcaacctgtgcagtaatttgtgccataattgcagtagcaacaccgattgatttaggagtttcaatctgtgcattaccaagcttaaatccattctcaagcattccttttaaatctactaaacaacaattagtaaatggaagagcaggggaataatcaatatcgtggaaatgaataattccgctttcatgcgctttcataataaaagacgggaccatatttttggcaatgtgtttagacacaataccagccataaggtcccgttgagttggaaaaacacgagaatctttattagcattctcgtttaaaaggtctttattagttttatgaatcaatccttcaatttctttttcaattgtcattttaaactctttctaagctgcttcttaaatgaagctattaactgtgttttggtgtcagattcattatattcaaatcctctttgaagcatctcggccatcatttcctcttttcctaaacgagaaaattcctttgatttatctccaacaaagttagggtgaatattattttgggtgtaatcggattttaaataagtaagtaaattttctaaccattcaagataatcaacaccttgtccctttaagccagaacgattaaatttgtgcttcatttgaccttctgcagcattgcagagattacaaagcaatccacgtacctttcctgcttttggtccatttaattcatggtcatgatcgaggtgattagcttgaacatcaggatttagttctcgttggcaaattaagcatttaccgttttgcgcatcataaaatttctgtttttcttctttatataatttgccagtcaataacataataaacccttaccttaaatagataagggtatttattattttcaagtattgtaaaacatttgattcaatcgcttatattgccgaatcttttggtcagaaaaagaaatttgggtttcaagccattcaatatattctgccgcagcttgcatcaaatttccttcatagccatcgttattttcttgtgcagctaatttagctaatgcgtatgaaatacgttcaccttgaaaatcggctttaggcttctgaacagcttgattagttcgctctacaacttcttcaatttcgccattttcgactgattcagtattccataagcaccaatacgtaattggcttatcatagatattaataatctttccgtcggaaagttcaatttcaataattccagtatcaggctctatatcatcttcacattcttttgcaagttcacgaactttaaagacagtacctgcactaagttccggccagtaattacacagccctgtatcagcacgattaattctaaaccacttatctactgtaatcatgtcccatctccatatcaattaagtcatttatcgttggttcattatatactgtttcttcatcagtgcaaaccggttcttccggctctggctctacagtttcccatctagccgcccaccaaggttttatagcgtaatccattctcgtactatctgagttactacacgttcacggggctcgactagttcaacagtcggaactgcataataccagtcagaatgataagaacctgaccgagattcatttaccgctacatgtacattatgttttggactaaagtaaacacactgacgatattggcatttaccatcttgcacccagtcttctatttcgataggtttaagatagtcggaaaaatcgaaatcatagttttccgaaaatgcatcatggtcttcgatgatttcgctcagaactgcatcaacatctaatttattttcaatagtcatttttcaccaattaatttcgcaatttattaagttcttcatcatcaatccaggattctagtcctgttggcaggtcacattcaatttcccaaagaagttcttcaattttatgaagacgatctagttcttcagcaggaatagtaaccattgacggagctcttgctacattaatatcgtaaatcatatttaccccagtttgaccatacaatcgccgtatttccacttagaaatagacttttcaccgttagaataataaacttcaagtttagcacgattatttttaatttgaataacctttgctgtcatcaaagttccatacccataataaactgcaacttcatcacctacatataccgcgcttccgcggtaatcgtgaatatagtcagttccttcgagcatcatttaaaatattctcgcagttggtcaaatccaccaatatgacttccatcaggagcaaatacctggggcattgtcaagccgatttgagtatcacgacctagtttagtcagaagctcagcaattttctcatcatcaaaaacacctttttccggcataatgttgataaattcaaacggctgtttcttcacggtcaaaagacgtttagcattatcgcaatacacacatttatgaatgttgctatcataaccatatactttaaacatattattccttaattcctagtacttgtttaaaagtctcgtcgtaatcaagactttggcccgtttgttctttatgtttgtatataatatcacttacttctgatagcatatttttatatgaacgagttaaagcagatttaagcacgctgtatctatcaggaaatttaccatgttcattataataagctattgctaattcacggactgccttttcagcagtctccatatattctttacgcttggtcatttttaatccaaaatattattaggcattggttgaacactcacaagttctttaaagaactcagtagagtcaggcaatttaaccatttccggagaatgcttattaaatttatgtttacaatgacggcatttatattcaagctctggtttacgccagttaatcaattgaacttgttcagtaccgcattcagggcaattaggaacgtttttagaagccctttcacgacgttcaaccatagccataatagcatcccatgctggaggtttaaaatctaaatcgtcgcagccgtgaatctttccacgcatttccaaatcgtcttcttcaccggccataataattttaattagactagaattacttgaagctgcaatgtcttctaataaacgctttttcatttcattacctcaatagcattacgtaaaccatttgcttttgcattaagagcttttaacaatttggtgtgttctgcaatttgggcttcaacttcaatcaaacgggcattgagatattcacgttcttcactcaaattatcaaccttttctactttaggctcttttacaactgtcttatatgtattagggttcttcagtttaattagaatgcgtgaactgtataacattgaaccattatcttcggtttcgtcatacatttccactacgtccataatttttaacatcatgcggagtttataagacaacgaacgaatagttttgttgtgcttattaatttctttagctgtcatggtgccaagattacgtgagtaataataaggaacctggatattaattaatactgatgaaccacctggcttgtgtgttacttcatcagcaataacccagtccttaacatgaactgtatttgtacggtcatcgcccgcggtaaatagtttgcgagcatgcttaaaaagcatattcacttggtcattgaattgacaagcaaatttatcagcaaatttggtttcaggaatggtagaaaaccaatcagccaaatgagtctttttaacatcattaacaatagtaaattcaaccaaatcggttatagatgtctcagatttaatgaagctcggcttcataaagtttttaatgttatcacgagctacagtagaagataacatacgagaacgtttaaaccattcaagcaaattgcctaacgaatgagaataagcgttttgagtatctttacagatatgattttcctgaccaacatattgaaggaaatcacgaagaatattattgattactgctctgtgcccgatctgataattacggtgtttagtaataagactgtcaaaataatcaatataatgtttacgagttttcatattcttctcacttggttaatgatttatactccgagccatccttggctttaaattacttaattaactgtaaagcttgttcaagacgatcaagacgattaacggattcttcccaaatctttttagcctgctcatattctttctgtgctttattagaaatttctagaacttctttataagctttttctagtgcaataacttctggacgaatttctaccggttcaggtgaatcgtcaagattatccattagttcctcaagggtagtttcttctttaggagtattcacaatttcctcacatttttgttgataaatttctttatcagtaggtgaataagcacatttcacttcacgaagactaattacaattttatatccttcccatccgcatatattcttaaaaggatatgtatgaatattttctactgtttccatacaaagtaatgcagtctctaactgacgagttatagtgctagcaattgagaaaaatttattaatattcttttggttagcgtttggtgtaaaaaatccataattcacaaaaatagctactttattttcatcaagctcatattcttttacgataatcatatcagaagccaaaggatgaatttgacgataatcgccataacataatttagaagctgattttagaatttgtcctttgaaaagtctgaaattactaatccaacggcgagtaaaaatattctcagggtcttctttattaagatgataagaattaacatcaccgaaccaattatatcctactacatctttggttcgtttaatttctttcccaaaattaccaagaatatcccgattaaccaaatatgaaagaagacgagactctttaaaggttttcttgataacatctttatctacacggctagaaattttacgaatttcatgaataaatttagcagaagaaacaatacttgcatcaacactattgagccactgattgataatagaaagaacgctattttggccaaacatcggtatagctttatcatcaataactctattgaatgatttaatatattcgttgcgagtcatattaatctcctcagtagaaagtaagaacattataccacatccttgtggcgaagtaaactagtttagtgcatttagtgcgttgttcaatttagaacgttgcttcgtgagattttttactttttcttgagctttttctagcatcttttcagcttctaacgcttcattagttgctttaacgagttcatcatctactgccttgatagacttctcaatcgcatccgcgtgccatttttcaacaggtttaagactaggattttcaacaggaagaaaattcactttattgaatttccatgcatcattattatctgagctatacatccaaaatttaggatcgtttgatgagtaattagataaatttaagttattttgtacttcctgcttcttctcttgcgtgacttcgtcctttctcaaaaaatcatatttaaatgaaacgatcatatcaagttcatacgttgttgtatgttcccaatttcgctcaaaacgaggtaaaatcttagattgaacagcagcaacaacatccatatacttaaatgcttctgtcagctgtgatttaagacattcacaaattgaacgagaatttttagtattaggtttaaagctaattcgtgcagttctattattttcttttaatggtcttacttccatttgaagagtataaccatcaaatttcagattctttaagttaatatcagaaccttttaatcgactagcagtagacaaaatttgctttaattgtttacggaatagagcaataaatctccattcaagacgataatgatttggattaaaaaatccagatgataaatcgaccttactctgaccaacaccttgaacaaatagaggatttttataatcaatagttttacagaaatcggtgagctgctcacgagcagtcatttgtgtaatatatcccgctttactaaaatgacgtaaccattcactgctattcatatatttaaagtgaatggaactattaactctatcagggtctaaattattttggcacaaaaatgtcataacattacgggtatagctggcattacgaaccatatcttcaatttgagaacgagttttcatagtgttccttaagatttaagtaaatcaacaattttaattaatttttcacgctcagatttagctttactactcaatccagatagtctgaaaatttcatcgtcatactgttgaatagaaatatttagctcttcaatttgcttattaaaataatcaatttgctcagaatgtttttcattactgcgaactggtacaggttttgtaggcaatttagttaaactggattcatccgggcgataaattaaaatacaacttgaaccaatcgggcatttagcaccagacacatattctaatgttccggcttcttttaaaacttcaaaagctaaacagagatgatgccccatattaacataatctgtagagcgagctctgacgtaataatcatcgccgcgaatactaaatttaaagcatttaaggtcttctgtattattggtcttaaaaatcatttgtttatctagacctttagctaatcgagcgcctaatgctaataatcgtcgttgattttcccacaaatctgcgatcatttggtcaaatgataatttcggcattagtcgaccataaaggtcatatcctttattataattacgaaggatttcactcgcgttaatacgagacaatgctccaattttattaagggctttcataatgcgattagataaacccattccagacccgtttgttcgctgcaaatgtttttctaatccaaatccaatatcaactttaaacttatctaaaatttctgcatgaacatctctgtcaataacattcaaatccaaagttgggttaaatctatgaaaaaatttatctggctctccacgacgaagtacagtccattcattcatttttttattaactaaagatttaattactgtattgacattattaattactactgacatattttcctcactcaatttcaattttactaaatacgcagaatatgatggaaaagactatataagcaccacacacagattgaactaataccattccaaagaaccaaacaatattatcaaacaatgtctgttttacgtcgaaaggacgtaaacttacagtaatattatcacctttttctattgacgaatacatctctggtgaaatatattcgctaaatctataaccgtctttgagttcatatacagcaataaacgataaactagaccccttcccttgagttcctgtaagggtattaactacagtaacatcataatctttataatgcatataatcattaattgcgtaataaccatatgcaactactacacataaacaacatatcaataaattcaatcttttaattatcaactgtttcataataatctcaattaaaagggcttagaaccattataccatccttggtataaagcggttatgcgagtaccgtctttaaccgttcttcaaacttccgaagagtattctggcgttcggctctttgctttttgtaagtttcaatacgctctgaaatgagagtgtatcgttcatttactgattctttcataaaatcaggaatttcacgagaagctttaatctcatcaaatttatcaataacagcttgctcttcagcaattaagttatcatacatcaaaatatctttcttgatgaactcaatatcttcttgagttacacgagataatttagatgctttatcctttttgtactgttcgttagtatcacgagaccagtgtaatgtacgatttttattcgtattcttgtaaatttctacaataccaatctcatcgataataacgatccaattccaacgggatttgtaaatttgtcctccatcaaccgtgatttcaccaccgattgagacatcattaaagaacttgctttgagcttcagatttaaatttaccatcattgtagtttaccaagttgaaaatatctttagcgttcattttctgttcctccgtagttgatagggtaatagtactacggaagaacagtcttgtaaaccactaaaagaaacttctttcacaattttttccactgaaccaagcgctcactgctttcttagtctcaggagcggtgttatccataaaccattcaaaggcagcctttttatgattatggagggcttctcgggctttaatctgctcacggtctattaacactaacatatgagcctttcttgtcaccaagggcttcttatgattcttggagtattcccagtcatttgtccaacgcattgtcgttgcgaactgaaatactgcttctttaattttagtttcgtaaatttcacgagcctttgagtataacatcattacctccattcaccagtttaattctagtcatctttttaatggcagtccatataatctatttctgaactgcctttttgttatagaagtcctcttatgaattatttcagaagagtaacctcagcgatttcttcccaaccgtttttgtcggtcataataaagtcagcaagataaagagcagtacgcagtgaaacattgcgtaaacgattaacattaactttcatccatgataatgctttataagtttcttcatcagaaagaccgcgcttttgcatcatgtcagttgaaagaataacatcttcaaccctgaccataatttcttcattagtgtgaacacccaaatccaaataaaccgagcgggacactaatgcttgtaaatgtggagcaagtttagtaccacggtctaattcgcggtcaatgtcaacgtttgtgataaaaacaatcgttcctttaaattcaaactcacgctcaatgcctttttcttctaagtaagaagacgcagtgctccagcagactttacgggtctctccagtgtccagagcggcttttagaagattaagaatgtccatatcggagaaaacatccacatcatcaatcaaaaggacagaattctcttcacgattattccaaagctgctcataaagaccaataccagagattttaccattaatgcttttatattcaatgtatccaatatcatttgctttatttaaagctttatctaaagaatacgttttaccaatacctgctgcaccagagataattaatgaacgaatgtttccgttaataataccattcgtcatcattcccataacattaaatcttttattaatgcgggttttcatatcttcatacgattctttaacttcttcaacttttacaccatcatatgaaatgtctgatttgtaaacccaaacaccgcgacgtttaccgtcaatttcaacaaaaactttaccatctccttgtgcatctaccggagcattatctgggaaccattcgcctaagagctcaaaagttccagagatttctttaccgaagtagatacccttattgatagttacagttttcattttattctccaaatccgtatcagttgatagttgtatagtaccataaagctttatgcttgtaaaccgttttgtgaaaaaattttgaaataaaaaagggagcccgaaggctccctatcatttataataacttcgatggttttcaagatagaccttctcaaggaagtcatcccagaaactcatgtctactgttttaggcataccattcttagaagcttcagtagatgctgcttctacttgatcgaccacatcttccaaaaactcttgaaccgttttaaatggatgtttacccaacttcacgtcgagaataaatggagcgtcttgaagtggataaaccaagtcaccagttttgtaaatttccaataattgaagtccaccacgacaagcatggctcagagctttccagtcaatgccttcgttggcttcggccttacgagcacgttcaccatattcagcatctaatttgttcagtgactgcttaagctcaataagagaaagcgttgtctgatatttacgacccaacacagtgtagaacgtttgtggacctgttttctcatgattatggaacacccattcacagaattcgttttctggaagacgatgcttaatatcttcaactttagtacgacgttgcttaatggaaccgtcttcttggtaatcaacccattgctcagggatttgattaactactttcaatacatcacgtaatgcagccaaacgagaacccttgacaccgtatttagaagcttgcttgcggacatatcctaaataggatttcatgttagtcgtataaaaacgagaacggttgtcttgaataaacttccacacatcaggcaaatctgatttaactactagctcaggtggagtgtgaagcatatccaatgctacggtttcaccatctgctgctaatttaaagaaatatttaagactgtatagttcatggtcaatatcatctttagtgtttttagatgatgtattgttagtatttttactcatatgctctttaacatttccgataagaatatcgcgagcaggaggaacaaagatttctttaaaatctacatcagattctggggtagaagttccataaagatgactaccaaaatagcttttcattactgttttcatcattcagccttatattcaataacaggacatactttagctttacgtgcttttaaaaattcgacgataatagatttcttgggttgaataggaggtaaacctttatacgccctatcaatattttctacatgtaaagcataatcctttttccatttataatctttatatttttcatgcagttgtgcaggaataacaaatgaaccaataataagtaaaacaagcaaaatggcaagtataaatgctgatggaataagagtccataaactaccaaaaataagccatttctgtatgatttctgcacagataatagttagacctgcgagtatagtacatccgaaaaaagaaacgaaaaatgtagggataacaatagaccaaaagtatgcacacagtgtcttaggtcgtttccattcgtcgttaaacagtttgaataatttatagtgccaagagttttcattaataatcataattatcctttcattgaaggtgtaacagttgttaaatacttaatcatagcttcagcttctgattttgataatgaaatttctccattgttttgacgaatagaaataaaatccggatgacggtcaccaccagcttttaaaacacacatataagtatcagtttcatcttcaatatctgaaataattgaagcagttccgcatgaatgtggtttttgataaatcaatgcagcttttcttccaccgtttgactgttcataaacttttaacacatcaaacaaatcgcttcttttatcaatagctaagatgttgttttcatcttcaatgttaaatccttcggatacttcataaagagttacccataaatcaccgatgtcaataacagcatttacttttccacgactttcaagaatgtgacaaattttcttgatttcgtcataactcattttaatagtatcatctccttgaataagaaagatgtcatttttaaattcaacacgaattaaaccactttcacttgaaataaacatatttcctcactttgaaatcatagttggaatgacagaatcaagataagtctttagcgcaatagcttcgtctttggtaaatgtgacaatatgtgctcgaaaatcatcaatttgacgaatagttaagacatctccatcttcataacattttgatacgtttaaaacagtttcatcattctgattgcaagcgttagtaataatagcattgcaatttttaaaccattttaaactatgttttctttcattagaataataaaaatatttaatcttatctataaaactatcccaatgaataactgataagcatattgactcgctttcaatattaaatcctgggcatgaagaataaaaatgaattttatgctcatcattaatgcttacaattttatcagtataaggattttcaattttggttaaatgaatgatttcactaggcgtaaaatacagcatatcgtcttcttgtgtcaaacgatacatattatttactttttctatagccaattcaccaaaaagtgaactaacttctaatactaatcgtttcgccgctaccgtcattacatactcctctgaatcatatcaataatgttgttcaccagattataagtaaacattgggtaattatattgaatcaccacatacacaacaagcaaaactttcattctcttctccttggcagttgacaagattactataccataaccttgccaacttgtaaaccattaaatgacgttttcaataaaattctgaagctttgtgtgagcatcaaccatgattttcatttcttcttttgcgaaagctgtacctctttcccgagcagaatactcatagtcagaaactgcattagcatattcttcaattagcttcattaaaaacatctgcttttcagttttcattattccacctaatcatttcaagatattgaactaacttagctttggatttatccaaatctcttttagctgcttctataccgtcgtatgaatatccttcacaatgctcaactgctaattgatatgaatctatttcaatatcacgtgctaatttaatgattttttcaaactgttcacgtgttagcataattaaactctcgtattatgatcgataatttcatcaagaaacatatctaacgcttctaaagcattatcaactttagcttcaagttcttcaatacttttatttgcaatgcctgacgaaaaccaagcaaagtcactaagttcctcatctgctttacgaattaaagctaccaattccttaattttatcagcttgttcgatactaatcattattccaccacatatgaaagagagaatattgcacacgccatgtgagttgcaacttcatcacacatattataacgtttcttaagaagttctacaagttcttcactagtaacttcatccatgtcgacgaaaaaatcaccattaatgatgacgtagatatttccttcttgattgagtgcttcaattttcatgatgttctcctctttattcgatagttgtatagtaccacaactcaaacggaaagtaaaccggtaaaatgaaaaaagtctcccgaaggagactaatgttattcgagggaaagaagatacttactctggtaaaacattccagtaatatcatctatcgtgctttgaatggctggaggcatttctttataaatgctgttagattggtctagtatgcgatcaatcattttaattgtgtcggtaggaagtttactggcatctggaattgaaggtgtgtattttctaccagaataccccaaatattgctcaccaaatttatcaatcaaatctggcaactcggagaaaataaaatcgtatgctttgtgtctagcataacttttagtttcaaaatgtgcagaatgaaaataagcttgtgcagccattaataaacctaagtattcatctgcctttgaaggttttccactttgtgaaaagtcgctgaatttcattcagtctccaatttaatgttcataattctagcgtatgattgtgccatctccgcgcctcgttctatacattcaaaatcagaagagcacgggtcatttttataggtcgttctcataaaactatagaattgttcagacgattctacgcttttattttcaaaaagcatataaacatgtctaataccagattccataaatttatcaaaatgaggatcgacattcgcttcaatcggtggagacaaagcaaatgctaatcctagcatggcaaatagtgccgttgcttttaaggccataaaggcctcctatcatttttgtcctgtatttactttatgccgatgcacggccttaactttatcaaggtatttttcaaaatttcgcaatctagtatagtctgccggagattggttgagtgatacttctcgacgcaaagctgaaatgatatttccaacttccctacgaatttcatctaattgaagaacagtaagattgcgaagttgcttttcagttaattgtagcatatatacccctttagttagataaacctatttataacttttgcactaaccgagctttttagttaattcattccaatgttttctacacaaagaaacataaatttcatcaccaatacagatttgattaccttctttaactggtgttccatcttccattaatcgagctgtcataatagcttttttaccacaatgacaaactgcttttagttcaataagtttatctgcaatcgccaaaagttctttagaaccttcaaataattttccagcgaaatcagtccttaacccataagccataacaggaacattatatgtatcaacaattcggcttaattgatgcacctgttcagtttttaaaaactgagcttcatctacaaatacacaatgaatatctttttgtgcttcagcccatttatagaactcaaaaatatccatatcatccgtaataatattcgcttcctgtttaattccaatgcgagaaacgacttcacagacagaatcgcgagtatcaatagcaggtttaagaactaatacacccattccgcgttctttataattatgtgcagcagtcaaaagagaagcagattttccagcattcattgctgcataagtaaaaattaaactcgccatatcaccttcttaaagcgtattcacataagctattaattcattttctttcttatcaaaccggtcagcaaattcttcttgttgttcgggagatagcgggccgtattcatcataaaaggtgtttgcttctgcatgctcatctagaagttcatggataagctcaaacaatttatctttttgttctttgcttaggctcacagtatgtcaatccccaaaagttttaaaatgactcgtttctgattcataaccgctacgattgaatgaccgttggggtctttttgacccgatccaattataaatcctttttgtgcagaaagttcaatcaaaacatcgagttcacgtaatagttgatattttaaatcatcattcattttggtttaccttctttaacgaaatcaggataaggataaaatcctgaataaaatccttcacctttatgattgatgcatcctttattagaacaatagcaccaataatcgaaatcacaagccatttcatcattacataaagcaaaaacaaccggccatttgcacttttcacaatgagcatttttaagaatactagtttggctcataaccatgtaacctttaagcaatattcttctacgtgttgtttacgacctttcttatcaataaaggtatattcaacgaatgttccaatatagtctttatttacatcatgtggactattaattgggcatttagtacggcaaatgcgttcccattgacgaataatttccgctttgtttttagggtcaaacggatgcgggtaatgtactttcataatccaccactattaaatcaatatcaggagtaaacatgtcgattaatttagaaaccttatcccaatcaccgccagcaataccgcaacctatgcgtggaatgtaaattactggtttaaacaaaagggtttctgcctgtagatttaattctatcatgcagtttactaaagcaccataatcaagattaggacccggttcgtattgcgtatacagattatagcatataccaaatcctgtaggactatgtttaaaaacaatagacatatcgcctaatttatcacgagaaccgtactcagtagtggttttatctatttctaaaattttgggataggctcttgctaattgacccgctacgcctgagcccattgtgtggaagcaattgcacccgtgcgcaataatattaccttgaagaaatagggcgacaatatcgcccttgatatattttacaatcatctagtactcaatcctcgattataagaatctactaaacggtcaaccattgaatgacaagcggctttatctttctcctccgcaactgaacattctaaggtattccactttttagcatatcgttttaacaatgtatcatttttgtatctgcttgatttatctctttctccgtctttatatgcatatattaatttctgcgcaaattcagcttggcatgctttatttttcccgcaataatccgcggcagtacggtttacatactctctaatttcagtatatgatgtatctgctaacgcagaaaatgaaattaatcctatacataaaaccaaaattttagtcatttactatttccaaaagtttattatttttaaggtaattagccttttctaggacttcagaagcatatttagaacctgctttaacattccatcccgaattataagaggatattgcttttcttatatcgcccttatgtatatttaaccaataagaaagttcaatgtacgcccaggaagctgaattggaccgtttattcaacattctttttatttcagcatcggtcatattataaccaagttccttaactctcgctcgcatagtcggcaaataattttggaacattccataggcatgatgctttggtttagattttaaattaactccggcagagctttcttgccacaaaatagcagccattatatgacctaatccgctcttgtggatatttttgtgtgttttatattttccatccttagaaaattgttccccgaattgatatgcgtagcgcatgttatcgagttggacattactgaaagtatgctcggagctatgtgccatcattgaaatggccaatagaccagcgagtagtgcttttctcatgcttacctcattgagttttaattactgctttagaagcctttcctggtaaacgacgactgttgataattgccatcctgcattgaagcgacgggtctttgaacttcgcattaggtttacaaactgtaaatccaagccaaagatttccatctgtaatttctaaacgtccagggcgatactcaaccccatcaataaaatcctcgtcaatatcaggacgtggaggcatactcaggaattcattaacttctaaaacatggtcttttattttgtggaataattcaaaaacatatgtctcatcaatctcccgttgaattgcacgatcaagaagatgctgagaatattttagatgaaacgatgagacccctgctgcttttgatgcctcacgaatctcattgttaatttgacgaaactccgactcaaagtgacgacgaagcttatttcgacggataaaaacttctgtgttgatagtcatgttattctcctcttaactgatagaaaaattataccacagtcaagaggaaaagtaaacagttattctttaaatctaatcaatttattcatagactttgaaacttctgcacggacctcatgtaggtttttaagctgttcaagacgttgctcatagtaagcaatttcatcttcttcaagacagtcctgtgaatcttctttaagataacgcgcatagtcctggaaagctttacggactacttcttggaagtcatcaagactttgaattttcttaggagcaacagatacacgacgaggggcagtataatactcataaccaaaccctgcgcttaattgagccattaatatttttcctctggttggaacacagcacgacaagcccacatactggcttctttgagtttcgttttagcaatagttaactgatcgaggctttcagcataattcttcgcgaattcacagtcttcacaattatctagtgcttcccaaaattcatcgtataaagcgtcaaagataagtcctaaacgaacttcagcatctttgatagcattcactttaccgattttctcttcagtgtgcggcttataacctttaatgtcttcaatcatattctacttcctcacccgttcccaaatcatattcaactaaacgaataggttcatgaattccatatccctgaacagaaatttctgtcgtaggataaattccatcaatatcacccatggtccacgcttcattaaattgctgttcgcctgaattactaaaccattctgcgaaagcatttaacacatctttagaaccttcaataattatctttgccattacaagctctcagtaaaggtacgagcgataacgtcgcgctgctgttccggagtcagagagttaaagcgaactgcataaccggatacacggatggtcagctgcggatatttttccggatgcttaactgcatcttccagagtttcacgacgcagaacgttaacgttcaggtgctgaccaccttcaattttaactgtaggctgtgattcaatttcaatttcacgggcgtgcaaaccgtagaaaatttctgggtctacaaaagagtcctctttaaaggttttagaaacaataattcgtgcttgaataccatcttcaaaataaatagtacctttatgtgtgccttcaagaatttgatatgctttcatataacctcaattagaaaataaatttatccaagattgttctttaattaaaaatggctcagaatcatatgccattaaactttgggtaattaatcctttaaaaggtccatcaataaattccatggtaaaatatggaattttattcattaactgcgcgttaggagcagtacacaaaactctgcatcctttgaatacgcctttttgtaatttgtattgcttgggataaaattcgctcaaaatgttattatttgccaaaatttcaaaatgatttaccaatttatttttaatagtttttggcgaaaaatagagatattcgaaaagctgtgtatctgtcatcattgcattccgattacgaaaaactgcggacgagtaataccaccaatgcaacatttactattacagcagtagtgtacagtgtcaatatggacactataaatcttatccatatcaggagatttgacaggctcatcaattatatacaaaattcgcgaaagcgataaacctctgaacttgcttcctttattaccaataaaactgcgcacagaatcagtaaataaacgaaaacgtatatcatcattagaataacgtgaaaattcctttttgatgttatttgcagaaattttagcgtaagctgaagtattagaaagaacaataactgttccgccatcatacagccaattagcagcaaagttagtcacagcagttgatttaccggattgacgtccaccatctagtcgaagtgtgcaatactgtttaagtaattcttcaaatggcgggatatattcgtttttacaaatttcttctactctagcatcagaatggtgtgtaaaagcattcatcagggatagataaggaccagttaaaaatgttctcattttattctctctaaatttgggccattccatggcgcatgaattgtccatttctgtatttacccattaccgcgctcaggctcgaccttattacaggttggcgggaatccctcacaaaatcatgaggtccaggttgttcccatattatttgaatgatttgacgtactgaatagaacctttactattcacaaaggcaattttaccatttttgttatacatggtagcagtacgctgatagccataagtttgtttaccagattgataaccaactaatgcaaaattatcttcgcccattttattctgcttagcgcggatacgttcatgaccgtgcgccataagaaccttagcgtcgccagttgcaatggatctacgagttttttcatcttcaactgtattaacaaagtcgtcaaatgaatcaaatttagcatgagatttattatacagttttccatctactgcataattatatccctgtacatccatctcaacttctgtaccatcatccaatacagcagtgattttttgaccttttttaaatttcaaaagatcagtaaaagattcagcaataatttgagaattaatagctgcttcagtaataaattcttgatatgttttcatatgtttcctttaaatgtaaatatttttaccgtaatacttgtaccaatgtggtttcattaaaattttttcatcaagtcgttgttgactcaatttaatagctgatttgcatggattataatcatttttccattctactggaatatcgctgatgtcaggaacttcagtatcttttatactgaacccgcgttttaagcattccgttataatgtctgattgacgctttcgcaaaaattctaacttatcgtaaaagaaagtaacatgaccagaacctaaaataaactcggaagatattttaaaatctttaacccgcttaccatttgccacatgtttacgaactataccaaaaacgcgtggcaattcacggtattctgcgattaaatgttgatcagcaagttcagatactaaagtcaaattaatacgagtcattttatccctccaagtaactgtgaataaactatcacaattctaagagaaagtaaacaactttatagatttttatacgcgtcccaagttccggttctaaacgttgcaataactcgttttgcacggttaggtgtttgattataccatctacttttagctaagttaactgctgcttcatcccaacgcttttgttgaagcatacgcaaagaattagtaaatcctgctacgccggtttctcccatttggaagaccatattaattaatgcacagcggcgaacagcatcaagagaatcataaactggttttaatttagcatttctcagaattccgcgaacagcagcatcaacatcctgattaaagagtttttcagcctcatcttttgtaattacaccattgcaattacgcccaatagctttatctaattcagatttagcaacacttagtgatggacttttagtaagcaaatgaccaatgccaatagtgtaataaccttctgtatctttatagattttaagtctaagaccttcatctatacgtaacatttcaaatatattcataatacctcctaagtatttatagaaggtatttataaattaaaagaggctgttcattattcggtaaagtgaagggcccatcacatattgccactgagtacgaggaataagagcaaaagcgtccatctctggaatcataacgccatctttattttcaaaataagactcacaatagcaatttctgaacatctcatgctctactggaatcgtataataaaataactgtaagtctttattactagaatatttaaatacacctaggtcttctagaaggtctggattataattgctaaaaccggtctcttctaaacattctcttcgtgctgcatctaatgcgcttaaatcagaattttctacacggccctttggaatatcccagcgatgtgccatcattccaggcttacgagaaccagtaacccgacccataaataaatctttatcttctgtcataaagataataccagctgataatgttttcattttaatttcctgcattcagtgataaagctatttaaattttgggtatatttcttttcatcaaaaatcttttgttgtctgcgtaaacgccatggcatttcaatgaacgtgtaccatatcccagataatattgctgctgtaaaaatattaacaagtatggttaaaataatccaatctcccgttctgtctactggactttctccaaagaagcaaaatacaaatgatgtcacaggaaaactaataatgtaccacagaatcataattttatctgtgaaccaatcagcatttgttaacttagcacgaccattatgaatacacacgaatttatcatctgttataatagatggcttagctgcttgatatcccattctaaactccctaatcaacaaatttttcatatcttcggaacaaccattccagtcaactctattaactgaaatgccatcatccccatcatctaaatcataccagcgagtttttaaaatcatttaattttcctacaatcactcacaaactcttccattgattctttttcaatataagacatgtagctattatattcctttaattgtattttgtaatccttttttctttgccaatttattttaaaattatcataatgaaaatataacatggtaccaaagaatgaaaataatgaaataattttagtatagtgaagttcactccaaacttctattatatttactgtgccgtcaatgtttaaaataagacagtcaattaacaatccaaaaagactacccgcaagagctgcagccaacgctacagcaaaaattaaaaatgactcaggaagagaatatttgactttatttagttttggcttttgcatcgtgattccttaacaaatttcataatttcatcaaattcatgcgcagcaagtttaagctgatgttcctttttaatctttttacactgagctttccaatcacgtacacgtttacgatagtgtcttccttgataccagtatcctatccaatttataggtactaataaaagcggaactaccaatggaagaattagtgttgctccaaatattgcaccagattcaatatcagtcataacgtctataactattccagcaatcagcagaatcacaaatgatacggctaccacaggacctattaacacatcagtagaaattatctgacgctttaattcatacttcaacggtttacttggaaggtatagtgatggctttgacatattctctacattccttaacaaatttttctaataataaatcgctttcaaaattgggattttctacgaatttatcaaaaagatcatcaacaatagttaagatattctttttactaagaatacgtttattttcatgcttcgtttcagaatcaactataagagtaaagaaatatttcttgccctgaaattttacagtagtatcaatatagaataaatttgacttttgtaaattacgtttaaaccatgcatcacttaaactataaacaccaagataatcataatcgtcgtttaaataacatactgtccattcaggagaaatgaaatcagtaaattcaacatcaaaatcacatgttaatgaatgaattgattcaatactgttaataagtattccaggacgtattaaagactttttacctttataaaatccagaaagactttcatcagtttcatatgaagaaccccaataataattacgtccttctgccatacgtttaagagcatttaataattggtctggaacatcaacctgtctttgaaactcttcaaacattgaattgaaatcactttgcattttcattcctatttactccaagtaataggggccgaagccccttatcattatttcagagaattaatgtattcctgaacatcggcagaggtagtttcaaccccagaaatattaccgttaaaggtttcaactcgagcaagagtatcttcaatatcaaccttagtcagtgctgcaatttcaactacatcatcagcagtactaattccaagggcattcgcggcgcgagtttcacggatatattccaatttaactgcaagttcttggcgagcatcatccaattcaactactttcttagcgatttcaattcgcatttcagcataaccgtcagctttagtagtcaactgctcagctgttcgacgatatagtaaaccgagtttagcatgcattgttacatcttgaccttcggaaagaagtttacgaatttcacgctcttttgattcggcttgtcgattcttttcgacaataagttcacgaatacgtttttcttcattaatagatttaacagaagcagtttttaggtctttaattttatcaagtagttttgctgctgcagcagtatactgttcttcaacagatagatttttagccatagcagaaccaagtttagtgcgaataaactcaacaattttcttcagcatgttcatagtatttccttaggttggtataattagataatatcacgttttaatagattgtaaacttattcttcgtctagctcgtcgataaagacgttgatggcctcgataacggcatcattgatagctaataaaataaaatcatcgtcagtacctttagaagattctaaagcattgatatatgcttggttggcgagttcccaagcctttttaaaataaggagcttcatcatcaggacaaatatcccgcacgccttcaaagatacgtttggcataatctaacacccattgcacaggcatgttttgagaacgttcgttaaactctttaaagtccttagattcaaaaagctcttcaggataattatttctattacaaaaagctttactaaagttacgtttcataatgttttcctcatttacataggctcataatatctcaatcatgagcctatgtaaacttatttcatattattgaaatattcttctgcgatttcgtcgttatcatggtaaactttagaagacagtttaacataactttcagcagtgaacatgttaatcacaacctttacagtataccactgaccgtcttcattgcccattaccgcataagtttcaaacatcggatgatcaggaccgataactttaatatcattcactgtacgaccgaaatcttctgaaacacatttcataaagaagttgaacagttcgccgtaattatccatttcgttctccaagttgttttctgtatcagtagttgatagttgtatagtaccatggaagaacagggatgtaaacagttttgtgaaaaaatttttaaaaagttttagggaattctagggtcaggaggggcaattaaaagataggataatatattataaagggtagaaactaaatgatgcctagagaggcccggaaaggcctagataccaaaaagccccaacctttcggctggggctaagaatgttatttgatttgtttagcagaccaaatgcggtctttaataattttttggatgtcttcaacatactcaagagagtgagcatgtgggttatctttgaaactataagcacgagctaacttttgaccttcagttttgattactaaaagctctttaaggatagcttcatatctggagataattcctttaacgatatttttctcttgtgtgactttaggatctgctttaggagcaggtttacctgaagcctttgcaaaagcagctccagtagcaactaaacttttccaagccatactaactgcattccctgtaaatccttcggctttcatatcacgagcaaattggaatcgtgattcatcggaagcatctttataggaatatttacccgcggcaatggctgcttttgcgacagcttgaatttcggtgctagatgcttcatttaacaccgcttcatttaaaaattgagcatatgatttcatcttatttcctgttttaattcgtggttttaatatacttatttatactaaaaagccccaacctttcggtcggggctaagccttgcggcaaccttgtcggggttccacctgctaaggcaagtgtttgtacgaaacgccgggattcgaacccggttattaagcagttgacgctacttaatatttttaaaaggccatatctcgaccatatccgaacgttccgtcaaaaacgctactcggcttacggcaaagatatttcctcgaatcgataattcggtgcgccgtttctgctgtgatgtaagagggcatcaataaacgcaaagattattaacacaattccttactcagggaacatcagtccgacgacttaccggtagcgacccggtttcttgtttggtcgaggcagtagggatcgaacctacgacctaggacttagaaggtccttgctcttccttctgagctatgcctcgtatttggcggacgtgataggattcgaacctataaccaatcgcttaacaggcgatcgctctgccattgagctacacatccaaattggtggggagtgatggagtcgaaccacccgagtcgcaatgacaatggatttacagtccacaccgctacctctacgggataactccccaaattaatttggtggccctgggtggaattgaaccaccatctggcgattatgagtcgcttgcttgaaccttccagctacagggccttggtgctgattgacggaatcgaaccgccgaccttctcattacaagtgagttgctctacctactgagctaaatcagcaaaactggcggaggcgataggatttgaacctatgagtcgccggagcgactgccggttttcaagaccggtgcattaaaccactctgccacacctccagtctccgcggcaggatttgaacctgcgacattctgctcccaaagcagacgctctaccaaactgagctacacggagtaaattaaattggagcggataatgagaatcgaactcacatcatcagattggaagtctgaggtaatgccattatacgatatccgcaaatttggtgcgagaagtgggactcgaacccacaaggaaatcattccgcagcattttaagtgctgtgcctttaccaatttgaccattctcgcgctgggaataaaggactcgaacctttgcatctagcagtcaaagtgctatgccttaccaacttggctaattcccaattattaacaaaggctcttaagcaagaacccttgatgatagagggtattaatcagtgcgatatgagttaataataacaaataattcttaaagcatatttaccatttatgataatacatatttacgatgcattcaagacccaaaggattcttgaaaatatcatattcaagaggacctttttctgtttcaataaagaaatcaaaatttactgtattaaatttacggtcttcctttactaatttaacttgagaagatgaacggtcaacgtaaaccttttcaacttcaaaatatgttaaaatgccataatcatcaatcaaggctttagctgcttcttgatcatatttatatccattttcaatggatgatactttcgcataaagaatcattatcaaccttcatcaacaatagtgtgcgtattggcatttacaatttgccaccaatcaaagcgattagaaccataatctggtttgttttcattttctttgataatgtcacggagttcatcttcggtagcggctttcgctattaaatcagcatatccaccacgaggataataattatcacctacaaaaagtaaaaagtttggtttaatgttattgaactcttcaagagtaataacttttcctgacggttgaacaatctctacatatttatatcccaatttttgagcagcatctactgcttcaagcaaagtatcatgagcccatccaatttgacaacctggcttttcagatggattagcctgataatccgcatacactttgtacattctattcacctttagaaattttatccataacgatagcgattaaaccaattaaaaatgctactacaagtgaaaaaacattttctgctgtagtcaataatccgcatataaatccaacaaacattgaaaaactaaaagcggaagcagaaattgcaatagcaacatttcgaattaattcacaacgtttcattttattctcctcggtagttgatagggtaatagtatcacaactaaaaccctatgtaaacaactttgtgaaatatttattacaaaagatttttagcaataatcttgagatgtgccgcagaaatgtgtttagctttaaacaacgcagtttcttcagcaggagagataatgattgtagcaccatcctttttagcagaccacccatcacctaggtaaacggtacctttgatttcttcgccatcaaccaagctaatcattggtttaccttctcgtcctttatttgctttaataacttcagaagtaagagtagcttcagtaatagtagaaaccggggtagttgtagaagtaaactctttgaaagttttcattttattttcctaattaattttgatgagataatagtatcactacctcatcagtatgtaaacaactttgtgaaattattttaaatcatctgcccaatcaagtttaagaggctctttatattcacgatctaatacgaccggaatttgtacatcaccgctaaatgataagggtccaacattataagacaatgttatatgcggtgtgtaatcatcaaaatcatgtgtagcacctagtgcccgcgcatacatgtgtctacagcgcagatattcagaatctagcacaagtacaagagtcgatccatcttgtgttttccatacttctaaatgtccagaagaagctacttcaaaacttccactcgatggaacatatggaacatttactctcgaataacatatagtcgaatgaattttttctctaggaactggattaggaacacgtaaagagcgctggagttcttccagcgcgtcaagtgttaattctgaaaacttagctgctacataaagacccgttgaaaagtctttaaattccattattcttcatcttttgcttcatcagcagattcagcagtaagattcttgacagcttcaacgatttcttcaactttgatagtatcgccagtgatacctactgcacgagcaatttcagccaaagttccttgcagaattttggattcttccatcagacgagccgcctggtcctgcgtatcaaggatacgagacttcagagttacgatttcagcagacagtttttgttcaatagtttgttcagacattatagtacctttagtgtatttttaattttagaaaaaagttcttcaagagaaccatcgtttgtaattactaaatcgccatcacgaattggcaatccagcttctgtaatatgagtatcattggatttttgaccaggacgaactacatgaattactgtagcacccatcgccctagccgcatccatttcatgatcttgacgagtatcaggaacgatataataatcataacctgagttaaatttatcaagataatctaaagcaaataattttacccaatacatgcggtcgaagttattaacaatcaaatccgtacctagggcttgcatcagacgacggactgaccattgatcttcaatattatttataacgtcagcaatcttgttaaatgctacgaaattaactgcgtcatcaaaaacaaacacacctttaattgggcttttactattaagatagcaaaatgcttgttccataatcgtaattacttctaatttagtcagatttaaattagtttcacgatcatagtcaattccttcaaactctttacgagttaaacaaggatagtcagtgtttgctgcaaatacaccccatgcataagccaatgcatccttaataggaccagcaagttgatatttaactgcagaataattattcataataaaatctgcagtagtatcttttccactacgctttacaccacttaaaaagattagtttcatatgtttctcctcaaatttagttaagattataacacatgaaactgaagcattaaacttctgctataatttttccatctttttctacttgaaaatacgtataaggaatcgttgctgtgcatactaaggctgggtctgaatcttctgtgtagctaaattctacttcagacaggtcagaaacccaaggcttataaaaatttattgacatcacgatttcagttttactattatctaaaatgtaaagcgtaatgtattcaggacctgttttttgggcagtattttcgcctgtaagatagttactagttcctagcatccattcatacattcctatccacgacttaagctcttcatcaactataaatctcacgatgagtggatcatactcaaatgtaactcctggacgctgtgctcggcctagtccaaacggcccagtcacggtatcagtaacaggtatcctaattcctggaataggaactgactgagcatttaaagtaaaagcagatgtagtattactatgcggtattgatactacaaagttagttgtatttgcttggttaaaaatttgttgcagagcttgcgacatatattcctcataatgctttataactgttggtggtataataggtctaagtcccttccattcaattccatttagaacaagcaacagaaaagaatggaagataatagaattagatatttgaccagactttgtttgcagagaaacgttttccttttgaaacgaactgctgaagcggcatcaacacaacgttcgcccagtctttcggggcgatttcaacaaggctacccataatattaccaggtatatatgccttaatcatttggtctgcacccctaaatcctttcacttgactccaatcaatttttaatttcgttttattagtaatagtaggtgtattcgaatattgctttaaaagctcttctagaaattgctgacgagctttaggtggaatatagtgcaagtttaatccgtacattaagttatgcttacctaaaccaagataaattatcaaaggaaatttatcccagtaaggaagagtttccttgtgtttagcatcataagcaaaagcatatattcgtcccggctgcgggcgaacaactttatgtccttttacttgcttaatagtttcagcaaaccattttctggttttattattaattgctgcaccttcattacgaattttatcgcgcaatgtttgtctgaatgaatttatcataagcagttgtctttcttgcttattgagcttattcattggttttgattcaagcttttgaatcttttcagccgttttaattcccgaagcatattttgacattgccgaagtaaacgtagagtatttgattcctctttcttcagcaaattgctttcctgtcattccttttgctttggcctttttatattcaagacctatttgaatccatttcttttcgtttaatgattgcttaacctttggaacttggggagtgctttcattaattatttgaaaaatagccattatgcccccttaaagccaagagctcgtaatccatcttctgttagaattctaaattttattccacgcttttcagctaaagattgtgctgctttccatttgtcggtattaacggaatatgtataaatttcattcataaatcttttcttcgctgcagttgttagatgtgctggtttaactggtggttgtgtttcttttttaggttttatttcaataaaaaattcttgtccagaagaatctttcatccaaatatccatgaagtatctacgttttttcccttcggcattacaaaaataaggaattactgctgtttcactaccccatgcaataatttctggatttttatctaaccattcaaaaaagaatttttcccaatttgatctatacgtaatttttttagggtcacctctatattttgatatatttttaggaacccattttccagaatatgccattggattctccttataaatagataatatatttataaacaggagggcccatgctctttacattttttgatccgattgaatatgcggccaaaacggtgaataaaaacgcgccgactattcctatgacagatatttttagaaactataaagactatttcaaacgtgctcttgcgggataccgcttacgtacttattatattaaaggttcacctcgtcccgaagaattagcaaatactatatatggaaatccacagttgtattgggttttattgatgtgtaatgataattatgacccgtattatggatggattacttcgcaagaagctgcttatcaagcatctatacaaaaatacaaaaatgtaggtggagaccaaatagtatatcatgtaaatgagaacggtgaaaaattttataatttaatatcatacgatgataatccatatgtttggtatgacaaaggtgataaagctagaaaatatcctcaatatgaaggagcacttgctgcggtcgatacgtatgaagctgctgttcttgaaaatgaaaaacttcgtcaaataaaaataatagcaaaatcagacattaattcatttatgaacgaccttatacgtataatggagaaatcttatggaaatgataagtaataaccttaattggtttgttggtgttgttgaagatagaatggacccattaaaattaggtcgtgttcgtgttcgtgttgttggtctgcatccacctcaaagagcacaaggtgatgtaatgggtattccaactgaaaaattaccatggatgtcagttattcaacctataacttctgcagcaatgtcaggaattggaggttctgttactggaccggtagaaggaactagagtttatggtcattttttggacaaatggaaaactaacggaattgtccttggcacgtatggtggaatagttcgcgaaaaaccgaatagacttgaaggattttctgacccaactgggcaatatcctagacgtttaggaaatgatactaacgtactaaaccaaggcggtgatgtaggatatgattcctcttctaatgttattcaagatagtaacttagacactgcaataaatcctgatgatagaccactatcagagattccaactgatgataatccaaacatgtcaatggctgaaatgcttcgccgtgatgaagggttaagactaaaagtttattgggatactgaaggatatccgacaattggtattggtcatcttatcatgaagcagccagttcgtgatatggctcaaattaataaagttttatcgaaacaagttggtcgtgaaattactggaaacccaggttctattacaatggaagaagcgacgactttatttgaacgcgatttggctgatatgcaacgtgacattaaatcacattctaaagtaggaccagtctggcaagctgtcaaccgttctcgtcaaatggcattagaaaatatggcatttcagatgggggttggcggtgtagctaaatttaacacaatgttaactgctatgttagcaggagattgggaaaaagcatataaagccggtcgtgattcattgtggtatcaacaaacaaaaggccgtgcatcccgtgttaccatgattattcttacggggaatttggaatcatatggtgttgaagtgaaaactccagctaggtctttatcggcaatggctgcgactgtaactaaatcttctgaccctgctgaccctcctattccaaatgactcgagaattttattcaaagaaccagtttcttcatataaaggcgaatatccttatgtgcatacaatggaaactgaaagtggacatatccaagaatttgatgatacccctgggcaagaacgatacagattagttcatccaactggaacttatgaagaagtatcaccgtcaggaagaagaacaagaaaaactgttgataatttgtatgatataaccaacgctgatggtaattttttggtagccggtgataaaaagactaacgtcggtggatcagaaatttattacaacatggataatcgtcttcaccaaatagatggaagcaatacaatatttgtacgtggcgatgaaactaagacggttgaaggtaatggaactatcctagtcaaaggtaatgttactattgtagttgaaggcaatgctgacattacagttaaaggagatgctaccactttagttgaaggaaatcaaactaacacagtaaatggaaatctttcttggaaagttgctgggacagttgattgggacgttggtggtgattggacagaaaaaatggcatctatgagttctatttcatctggtcaatacacaattgatggatcgaggattgacattggctaatatacttccaatgagcgctgatttaggagaatccatggaaggttcttctatcgacgtcacctttaccgctcaattagaaacaggtgaaacgttagtatctataaatataactagttacgaagaaactcctggggttttagtagaagaaaatcgcttatatggaacatatgaatctgtatttggatttggaaatgatgcattgaaatatcgtttagataatgaatttaaaactgctgcttcatgggaagaccttccaactgattctaatactcagttatatttatggaaagctcctcaaaacctccagaagacattcacttacgaagtaacattaatatatgactaccaagaacaaggtgaatctggaggttctggcagtaattctaggtcatcttctgatactactgaaccaactgatcctccagctccaataagaaaaactcttgttaaaaattatacaaaaactatagttggaaattggagccgttgggctaataaattgagaagctacgtgtatgagaggccataaatgtcaggattaagttatgataagtgtgttactgccggccatgaagcatggcctccaacagttgtgaatgctacgcaaagtaaagtattcactggaggaattgctgttctcgtagcaggtgatccaattacagaacatacagaaattaaaaagccatatgaaacacatggcggagtgacacaacctagaacttctaaggtatatgtcactggaaagaaagctgttcaaatggctgatccaatatcatgcggtgatactgtggctcaggcatcatctaaagtattcattaaataggatttaaaatggcaaatacccctgtaaattatcaattaacaagaacagcaaatgctattcccgagatattcgtcgggggtacgtttgctgaaataaaacaaaacctcattgaatggcttaatggccaaaatgaatttttggattatgattttgaaggctcaagattaaacgttctgtgtgaccttttggcttataatacgctgtacattcaacagtttggtaatgctgctgtgtatgaaagctttatgcgtactgctaacttacgaagttcagttgttcaagctgcacaagataacggatatttacctacttcaaaatccgctgcacagaccgaaattatgttaacatgcaccgacgcattgaataggaattacattactattcctcgcggaactcgctttttagcatatgcaaaagatacttctgttaatccatataacttcgtttctaccgaagacgttattgctattcgtgataaaaataaccaatattttccgcgtttaaaattggcccagggacgtatagtaagaactgaaatcatttatgataaattaacacctattatcatttatgataaaaatattgatagaaaccaggttaaattatatgttgatggagcggaatggattaactggacaagaaagtcaatggttcatgctggttcaacatcaacgatttattatatgcgtgaaactattgatggaaacactgaattctattttggcgaaggtgaaatttctgttaatgcttctgaaggagctttgaccgctaattatatcggaggtcttaaacctacccagaactctacgattgttattgagtacatcagtactaacggtgcagatgcgaatggcgcagtcggattttcatatgcagatacattaacaaatataactgtcatcaatattaatgaaaatccaaacgacgacccagattttgtcggagcagatggcggcggtgatccagaagatattgagcgtattcgcgaattgggtactattaaacgcgaaacccagcaacgctgcgtaactgcgactgactacgatacattcgtttcagagagatttggttctattattcaagctgttcagactttcactgattctactaaacctgggtatgcatttattgctgctaaacctaaatcaggattgtatttaactactgtgcaacgtgaagatattaaaaattatctcaaagactataatttagctcctattacgccatcaattatttctcctaattatctttttattaagactaatttaaaagtcacatatgctttaaataagctgcaagaatccgaacagtggctcgaaggtcaaataattgataaaattgatcgctattataccgaagatgtagaaatttttaactcgtctttcgctaaatctaagatgttgacatatgtagatgatgcagatcattctgtcattggttcatcagcgactattcaaatggttcgtgaaatacaaaacttctataaaacgcctgaagcgggtattaaatacaataatcaaataaaagatcgttctatggaatctaatacgttttcatttaattctggacgaaaggttgtaaatcctgatactggtttagaagaagatgtattatatgacgttcgtatagtatcaacagaccgagattctaaaggaattggtaaagttattattggtccatttgcttctggcgatgttacagaaaatgaaaacattcagccgtatacaggcaacgattttaacaaattagcaaattctgatggacgcgacaaatattatgttatcggtgaaataaattatccagctgacatgatttattggaatatcgctaaaattaatttaacatctgaaaaatttgaagttcagactattgaattatattctgacccaaccgatgatgttatctttactcgcgatggttcactgattgtatttgaaaatgacttacgtccacaatacttaactatcgatttggagcctatatcacaatgacagtaaaagcaccttcagtcactagtctcagaatttccaagttatccgcaaatcaggtgcaagtacgctgggatgacgttggtgctaatttctactattttgtagaaatcgctgagacaaaaacagactcgggggaaaaactcccgagtaatcaatatcgttggattaatttaggatatactgcaaataacagcttcttttttgatgatgctgatccattaacaacatacattattagagtagccacagctgcgcaagattttgagcagtctgactggatttataccgaagagtttgaaacttttgctacaaatgcttatacatttcaaaacatgattgaaatgcaattagccaataaattcattcaggaaaaatttactcttaataattctgattatgttaattttaataatgacactataatggctgcattgatgaatgaatcgtttcaattcagcccatcatatgttgatgtttcatcaataagtaattttattattggtgaaaatgagtatcatgaaatacaaggttctattcagcaagtatgtaaggatattaaccgtgtttatttgatggaatcagaagggattctatatctttttgagcgctatcaacccgtagttaaagtatctaatgataaaggacaaacctggaaagctgtgaagctcttcaatgaccgtgtaggatatcctttatctaagacagtatattaccaatctgcgaacacaacatacgttctaggatacgacaagattttctatggccgcaaatctactgatgttagatggtcagctgatgatgtcagatttagttcacaggatataacattcgctaaacttggtgaccaattgcatctaggatttgatgtagaaatttttgccacttatgcgactttaccagcgaatgtataccgcattgcagaagctattacttgcaccgatgattacatttacgttgtcgccagagacaaagttagatacataaaaacgagtaatgcacctatagattctgatccattatctccaacatattcggaaagactttttgaacctgataccatgactataactggaaatcctaaagcagtatgctataaaatggattctatcggtgataaagtttttgctcttattattggagaagttgaaacattaaatgccaatccgagaacatcaaaaataattgattctgttgataaaggaatatatgttttaaatcatgatgaaaaaacatggaaaagagttttcggtaataccgaagaagaaagaagacgtattcaacccggatatgcgaatatgtcaactgacggtaaattagtttctctgtcttcgagtaattttaaatttttaagtgataatgttgttaatgaccctgaaactgcagcaaaatatcagttaattggcgctgttaaatatgaatttcctcgtgaatggttagctgataagcattatcatatgatggcatttatagcggatgaaacatctgattgggagacttttactcctcaaccaatgaaatactacgcagaaccgttctttaactggtctaaaaaatctaacacacgttgttggataaacaactctgatagagctgtagtagtttatgctgatttaaaatacactaaagttatagaaaatattccggaaacatcaccagatagattagttcatgaatactgggatgatggtgattgcactatagtaatgccaaatgttaaattcactggatttaaaaaatatgcgtctgggatgcttttctataaagcctccggtgaaataatttcttactatgattttaactatcgtgtgagagatacagtagaaattatttggaagccaactgaagtatttttaaaagcatttttacaaaaccaagagcatgaaactccttggtcgcctgaagaagagcgtggattggctgaccctgatttaagaccattgattggcacaatgatgcctgattcttatttgttgcaggattcgaattttgaggcattttgcgaagcatatattcagtatctttctgatggatatggaactcagtataacaatttacgaaatttaattcgtaacaaatatccacgagaagagcatgcatgggaatatttgtggtcagagatatataaaagaaacatttatttaaatgctgacaaacgtgatgctgttgcaagatttttcgaatcacgtagctatgatttttattctactaaaggaattgaagcatcatacaaatttctttttaaagttctttataatgaagaggttgaaattgaaattgaatctggggctggtactgaatatgatataattgttcaatctgattctttgactgaagacttagtaggacaaacgatttatacagctacaggaagatgtaatgttacttatatagaaagaagctattctaatggtaaattgcaatggaccgtaactattcataatcttttgggaagattgattgccggtcaagaagttaaagcagaaagacttcctagttttgaaggcgaaattattcgtggggttaaaggaaaggatttgcttcaaaataatatagactatattaatagaagtcgatcatattatgtaatgaaaattaaatccaatttaccttcttcccgctggaaatctgacgttattcgttttgttcatccagtaggatttggatttatagcaattacccttttaacgatgtttattaatgttggtttaactcttaaacacacagagactataattaataaatacaaaaactataaatgggattctggattgcctactgaatatgctgatagagtagctaaattgactccaactggtgaaattgagcatgattcggtaacaggcgaagcaatttatgagcctggcccaatggctggtgtagaatatcctcttcctgatgactataatgctgaaaataataattcaatatttcaaggtcaattgccgtctgaacgacgtaaattaatgagtcctttatttgatgcatctggaacaacatttgcgcaatttagagatttagttaataaacgtctaaaagataatataggaaatccaagagaccctgaaaatccaacacaggttaaaatagatgaatgattcaagtgttatctatcgtgcgatagttacttcaaaatttagaacagaaaaaatgttgaatttttataattcaattggaagtggtccggataaaaacactatctttatcacatttggaagatcagaaccatggtcatcaaatgaaaatgaggtgggctttgctccaccttatcctaccgattccgtattaggtgtaactgacatgtggactcatatgatgggaaccgtaaaggttcttccatctatgcttgatgcagttattcctcgtagagattggggagatactagatatccggatccatacacatttagaattaacgatattgtagtgtgtaactcagctccttacaatgctactgaatcaggcgcaggctggttagtatatcgttgtttagatgttcctgatgccggaatgtgttcaatcgcatctttaactgataaggatgaatgccttaagttaggtggaaaatggactccttctgctaggtcaatgactcctcctgaaggtcgaggagatgctgaaggaacaattgaacctggggacgggtatgtttgggaatatctatttgagattccgcctgatgtatctataaatagatgcacgaatgaatatatcgtggttccttggcctgaggaattaaaagaagacccgactagatgggggtatgaagataatctcacttggcagcaagatgattttggattaatttaccgtgttaaggcaaatactatccgttttaaagcatatttagattcagtttattttcctgaggctgcattgccgggaaataaaggatttagacaaatatcaataatcacgaatcctcttgaagctaaagctcatccaaatgacccaaacgttaaagctgaaaaggattattatgatccggaagatttaatgaggcattcgggcgaaatgatttatatggaaaataggccacctattatcatggcaatggatcaaacagaagaaatcaatattctgtttacattttaacttaagggagcccatgggctccctttttctttataaatactataaactcataaggaaaccgctatgttcattcaagaaccaaagaaattgattgataccggcgaaattggtaacgcttctactggtgatatcttattcgacggtggtaataaaattaatagtgattttaacgcaatttataatgcgtttggcgatcaacgtaaaatggcagtagcaaatggaactggagcagatggccaaattatccatgctactggatattatcaaaaacactctattgcagagtacgcaactccagtaaaagttggcactaggcatgatattgatacctctactgtaggtgttaaagttatcattgaaagaggcgaacttggcgactgcgttgaatttattaactcaaatggatctatatcagttactaatcctttaacgattcaagcgattgattcaattaaaggtgtttcgggtaatttagtagtaactagcccatatagtaaagtaactttacgctgtatttcatctgataattctacatcggtttggaattattctattgaaagcatgtttggacaaaaggaatcaccagctgaaggtacatggaatatttctacatccggatcagttgatattccactatttcatcgcaccgaatataatatggctaaattgctagttacatgccaatcagtagatggaagaaaaattaaaacagcagaaataaatattcttgtggatactgttaattcagaggtcatttcttctgaatatgctgtcatgcgagttgggaatgaaaccgaagaagacgaaatcgctaatattgcatttagtattaaagaaaattacgtaacggcgactataagttcttcaactgtcggtatgagagcagcagttaaagttatcgctacgcagaaaatcggggtggctcaataatgaaacaaaatattaatatcggtaatgttgtagatgatggtaccggtgactacctgcgtaaaggtggtataaaaataaatgaaaactttgatgagctttattatgaactcggtgatggtgatgttccatattcagccggtgcctggaaaacttataatgcttcatcaggacaaacattaacagcagaatggggaaaatcatacgctattaatacatcttctggaagagtgactataaatcttccaaagggtacagttaatgattacaacaaggtaattagagccagagacgtatttgctacatggaacgttaatccagttacactagtagctgcttccggtgatacgattaaagggtctgcagtaccagttgaaattaatgttcaattcagcgatttagaactagtgtattgcgccccaggacgttgggaatatgtcaaaaataaacaaattgacaaaattaccagttcagacattagtaatgtagctcgtaaagaatttttagtcgaagttcaaggacaaacggactttttagatgttttccgtggaactagttataatgtaaataacatcagagtaaaacatcgcggtaacgaattgtattacggtgatgtatttagcgaaaacagcgattttggctctccgggcgaaaatgaaggtgaattagttcctcttgatggatttaatattcgattaagacagccttgtaatattggtgacactgttcaaatcgaaacatttatggatggtgtatcgcagtggagaagttcatatacaagacgtcaaattagattgttagattcaaaattaacgtcaaaaacttctctagaaggaagtatttacgttactgatttatcaacaatgaaatcaattccattttctgcttttggattaattccaggagaacctattaatcctaactctcttgaagttcgttttaatggaattttgcaggaattggctggcacagctggaatgccattatttcattgtgttggtgccgattcagacgatgaagtagaatgctctgttttaggtggaacttgggaacaatctcataccgattattcagttgaaactgatgaaaacggcataccggaaattttacatttcgatagagtatttgagcatggtgacattatcaatatcacctggtttaataatgatttgggtacattattaacaaaagatgagattattgatgaaaccgataatctctatgtatcgcaagggccgggagtagatatttctggtgatgtaaatttaacagacttcgataaaattggttggccaaatgtagaagcagttcaatcttatcaacgcgaatttaatgctgtttcaaatatctttgatacgatttatcctattggaactatatatgaaaacgctgttaatccaaacaaccctgttacatatatgggattcggctcatggaaattatttgggcaaggaaaagttttagttggatggaatgaagatatttcggaccctaactttgccctaaataacaacgatttagattcgggcggaaatccttcacatactgcaggcggaacaggtggttctacttctgttacattggaaaatgctaatcttcctgcaactgagacagatgaagaagttctaatagttgatgaaaatggatcagtcattgttggtggatgtcaatacgatccagatgaatctggtccagtttacacgaaataccgtgaagctaaagcatctactaactctactcacactccgccaacatcaataactaacattcaaccatatattacagtttatcgttggataaggattgcataatgagtttacttaataataaagcgggagttatttcccgcttagccgattttcttggttttagacctaaaactggtgacatcgatgtaatgaatcgtcaatcggttgggtcagtgacaatttctcaattagcgaaaggattttatgaaccaaacgtagaatcagctattaatgatgttcataatttttctataaaagacgttggtacaattattactaataaaactggtgtttctcctgagggtgtttctcaaactgattattgggcattttcaggaactgtgacagatgattcgcttcctcctggttctcctgttactgtattagtatttggtcttccggtttcagcaacaaccggaatgacagctatcgagtttgttgccaaagttcgtgttgcgctacaagaagctattgcgtcatttactgctatcaattcatataaagaccatccaactgatggtagtaaattagaagttacttatttagataatcaaaaacatgtattaagcacatattctacatatggaataactatttcccaagaaattatttcagaatctaagcctggatatggcacatggaatttgcttggtgcacaaactgtaactttagataatcagcaaactccaatagtactttatcattttgagagaacagcatgagtaataatacataccaacacgtttctaatgaatctcgctatgtaaaatttgatccaactggtacaaattttccagcagagattactgatgttcaggctgctatagcagccatttctcctgctggtgtaaatggagttcctgacgcatcatcaacaacaaagggaattttatttcttgccactgaacaggaagttatcgacggaactgataataccaaagcagttacaccagcaacgttggcaacaagattatcttatccaaatgcaactgaaactgtttatggattaacaagatattcaaccaatgatgaagcaattgccggagttaataatgaatcttctataactcctgctaaatttactgttgcccttaataatgcctttgaaacacgagtttcaactgaatcatcaaatggagttattaaaatttcatctctaccacaagcattagctggcgcagatgatactactgcgatgactccattaaaaacacagcagttagctattaaattaattgcgcaaatcgctccttctgaaaccacagctaccgaatcggaccaaggtgttgttcaattagcgacagtagctcaagttcgtcaaggaaccttaagagaaggctatgcaatttctccttatacgttaatgaattctactgctactgaagaatataaaggcgtaattaaattaggaacacaatcagaagttaactcgaataatgcttctgttgcagttactggcgcaactcttaatggtcgtggttctacaacgtcaatgagaggcgtagttaaattaactacaaccgccggctcacagagtggaggtgatgcttcatcagcactagcttggaatgctgacgttatccaccaaagaggtggtcaaacgattaatggaacacttcgcattaataatacgctcacaatagcttcaggcggagcaaatattaccggaacagttaacatgaccggtggttatattcaaggtaagcgtgttgtaacgcagaatgaaatagacagaactattcctgtcggagctattatgatgtgggcggctgatagccttcctagtgatgcttggcgcttctgtcatggcggaactgtttcagcatcagattgtccattatatgcttctagaattggaacaagatacggcggaagttcaacaaatcctggattgcctgatatgcgtggactttttgttcgtggctctggtcgtggctctcacttaacaaatccaaatgttaatggtaatgaccaatttggtaagcctagattaggcgtaggttgtaccggtggatatgttggcgaagtacaaaaacagcagatgtcttatcataaacacgctggcggatttggtgagcatgatgattctggagcattcggtaatacccgtagatcaaattttgttggtacacgtaaaggacttgactgggataaccgttcatacttcaccaatgacggatatgaaattgacccagcatcacaacgaaattccaaatatacactaaatcgtcctgaattaattggaaatgaaacacgtccatggaacatttctttaaactacataattaaggtaaaagaatgacagatattgtactgaatgacttaccattcgttgacggccctcctgcagagggccagagccgcatttcctggattaaaaacggcgaagaaatattaggagctgacacacagtatggaagtgaaggttcaatgaatagacctacagtttctgtactaagaaatgttgaagttcttgataaaaacattggaatacttaaaacatctttagaatccgcgaatagtgatattaaaacaattcaaggcatcttagatgtatctggtgatattgaagctttggcccaaataagtatcaataaaaatgatatttctgaccttaaaacgctaaccagtgaacatacagaaatattaaatggaactaatagtacagttgacagcattcttgctgatattggtccatttaactccgaggccaactctgtatacagaacgatcagaaatgatttactatggataaagcgtgaacttggacaatacacaggtcaagatattaatggtcttcctgttgtaggaaatcctagcacaggaatgaagcatcgcattattaataatactgatgtcatcacttcacagggaatacgtttaagcgaattagaaacaaaattcattgaatctgatgtaggttctttaactattgaagttggtaatcttcgcgaagagcttggaccgaaaccaccgtcattttcacaaaacatctacagtcgtttaaatgaaattgacactaaacagacaacagttgaatctgacattagtgctattaagacctcaataggatatccaggaaataattcgattattacgagtgttaatacaaacactgataatattgcatctattaatttagagctaaatcaaagtggaggtattaaacagcgtttaaccgttattgaaacttctattggttcagatgatattccttcgagtattaaaggccaaatcaaagataatacaacttcaatcgaatctctaaatggaatcgtcggtgaaaacacttcatctggtttaagagcgaatgtttcatggttaaaccaaattgttggaactgattctagcggtggacaaccttctcctcctggatctcttttaaaccgagtttctacaattgaaacttctgtttcaggcttgaataacgatgttcaaaacctacaagtagagattggtaataacagcacaggaattaaagggcaagttgtagcgttaaatactttagtaaatggaactaatccaaacggttcaactgttgaagaacgcggattaaccaattcaataaaagctaacgaaaccaacatcgcatcagttacacaagaagtgaatacagccaaaggtagtatatcttctctgcaaggtgatgttcaagctctacaagaagcaggttatattcctgaagctccaaaagatggtcaagcttacgttcgtaaagacggcgaatgggtattactttctacctttttatcaccagcataacatggggccgcaaggccccaaaggatttttaaatgtcaggatataattctcagaatccaaaggaactcaaagatgtcattctaagacgtttaggggctccaattattaatgttgagttaacacccgatcaaatctacgattgcatccagcgtgccctagaattatacggtgaataccattttgatggacttaacaaaggttttcatgtattttatgtaggagatgacgaagaaaaatataagaccggagtcttcgatttaagaggttcaaatgtattcgcagtaactcgcattttgcgtacgaatgttggatcaataacgtcaatggacggaaacgctacatatccatggtttactgactttcttttaggaatggctggtattaatggtggcatggggacttcttgtaatagattttatggaccaaatgcctttggagctgatttagggtattttacccagcttaccagttacatgggaatgatgcaagatatgctttcgcctattccagatttttggtttaattcagcaaatgaacagctcaaagtcatgggaaacttccaaaaatacgatttaattatcgtagaaagttggactaaatcatatattgatactaataaaatggttggaaatacagtgggatatggaacagtcggtccacaagatagctggtcattatctgaacgatataataacccagaccacaatttagttggtcgcgttgtcggtcaagacccaaatgttaagcaaggtgcttataataatcgttgggtgaaagactatgctacagctttagctaaagaattaaatggccaaattttagcacgtcaccaaggcatgatgcttcctggcggtgttacaattgatgggcagcgcttaatagaagaagctcgattagaaaaagaagcattacgcgaagaattatacttgctcgatcctccatttggaattttggtaggttaatatggctacttatgataaaaatctttttgctaaattagaaaatcgcactggttattctcagactaatgaaactgaaatattaaatccttacgtaaatttcaatcattataaaaacagccaaatattagctgatgtattagtggctgaaagcattcaaatgcgaggtgtagaatgctattatgttccaagagagtatgtttcccctgatttgatattcggcgaagacttaaaaaataaatttactaaagcttggaaattcgctgcatatttaaattcattcgaaggatatgaaggagctaaatcgttctttagtaattttggtatgcaagtacaggatgaagttactttgtccattaatccaaacttgtttaaacaccaagtaaatggaaaagaacctaaggaaggcgatttaatatattttcctatggataacagcttattcgaaattaactgggttgaaccatatgatccattttatcaattaggccaaaacgctattcgtaaaattacagcaggtaaattcatttattctggagaagaaattaatccagttctacagaaaaatgaaggaattaacattccagaatttagtgaattagaattaaatcctgttcgcaatcttaacggtattcatgacattaatattgatcagtatgctgaagtagatcaaattaattctgaagctaaagaatacgttgaaccttatgttgttgtcaataacagaggcaaatctttcgaatctagcccatttgataatgatttcatggattaataaatattataaactaattaaagcccagattaggagaaatcatgtttggttatttttataattcgtcttttagacgatatgctaccttgatgggcgatttgttttcaaatatccaaatcaaacgtcagttagaatctggtgataagtttatacgtgttcctattacgtatgcatcaaaggaacacttcatgatgaaattgaataaatggacatcaataaattcacaagaagatgtagctaaagttgaaaccattctacctcgtataaatttacatttagttgattttagctataatgctccatttaaaacaaacattttaaatcagaatttactgcaaaaaggcgcaacttctgtagtatcacagtataatccatctcctattaaaatgatttatgaattgagtatctttactcgctacgaagatgatatgtttcaaatagttgaacagattcttccatattttcaacctcattttaatacaactatgtacgaacagtttggaaatgatattccatttaaaagggatattaaaattgtactgatgtctgctgctatagacgaagctatagatggggataatttatctcgtcgtagaattgaatggtcattaacatttgaagtaaatggatggatgtatcctccagtagatgatgcagaaggattaattcgtactacttatacagattttcacgccaatacaagagatttgcctgatggcgaaggtgtttttgaatctgttgatagcgaagttgttcctcgagatattgacccagaagactgggatggaacagtaaaacaaactttcactagtaatgtaaatagaccaacaccgccagaacctcctggcccaagaacatagaggttattatggaaggtcttgatataaacaaacttttagatatttctgacctccccggaattgacggggaggaaattaaagtatatgaacctctgcaattagtagaagttaaaagcaatcctcaaaaccgtactccagacttagaagatgattatggagtagttcgtcgaaatatgcattttcagcaacaaatgctaatggatgcagccaagatttttcttgagacagcaaagaatgctgattctcctcgtcacatggaagtatttgcaactcttatggggcaaatgactacgacgaacagagaaatactgaagcttcataaagatatgaaagatattacatctgagcaggttggcactaaaggtgctgttcctacaggtcaaatgaatattcagaatgcgacagtattcatgggttcaccgacagaattaatggacgaaattggtgatgcttacgaggctcaagaagctcgtgagaaggtgataaatggaacaaccgattaatgcattaaatgatttccatccgttaaatgaagctggaaaaattttaataaaacacccaagcttagcggaaagaaaagatgaagatggaattcattggataaaatctcagtgggatggaaaatggtatcctgaaaaattcagtgattatcttcgtctacacaaaatagtaaaaattccaaataattctgataagcctgaattatttcaaacctataaagataagaataataaaagatctcggtatatgggtcttcctaacttgaaacgagctaatattaaaacacagtggactcgtgaaatggttgaggaatggaaaaaatgccgagacgatattgtgtattttgcagaaacatactgcgccattactcatattgactatggtgttataaaggttcaattgcgtgactatcagcgtgatatgctcaaaataatgtcatctaaacgtatgactgtttgtaatttatcacgtcagcttggtaaaacaactgtagtagctatttttcttgcacactttgtatgctttaataaggataaagctgtaggtattcttgcgcacaaaggctcaatgtctgcggaagttttagatcgtactaagcaagcaattgaactgcttcctgactttttacagccaggaattgttgaatggaataaagggtctattgaacttgataatggttcctcaatcggagcctatgcttcctctcctgacgcagttcgtggtaactcgttcgcaatgatttatatcgacgaatgcgcatttattccaaacttccatgattcctggcttgctattcagccagtaatttcatctggtcgtcgttcgaaaattattattactacgactcctaatggattaaatcatttttatgatatttggactgctgctgttgaaggtaaatcagggtttgaaccatacactgctatttggaattcagttaaagaacgtctttataacgatgaagatatttttgacgatggatggcaatggagcatacaaaccattaatggttctactttagctcaatttcgtcaagaacacactgcggcgtttgaagggacttctggtacattaatttcaggaatgaaattagctgttatggatttcattgaagtaactccagatgatcatggttttcatcgatttaaaagccctgaaccagatagaaaatatattgcaactctagactgctcagaaggtcgtgggcaagattaccacgctttacatattattgatgttaccgatgatgtgtgggaacaagttggtgttttacactcaaacactatttctcatttaattctacccgacatcgttatgcgttatttagtagaatataatgaatgcccagtttatattgaattaaatagtactggtgtgtcagttgcgaaatcactttatatggatttagaatacgaaggcgttatttgcgattcatatactgatttaggaatgaagcaaactaaacgaacgaaagcagtaggatgctctacattaaaagaccttattgaaaaagataagcttattattcatcaccgcgcaactattcaagagtttagaacgtttagtgaaaaaggcgtgtcttgggcggctgaagaaggttatcatgacgatttagtaatgtctttagtaatttttggatggttatcaacacaatcaaaatttattgattatgctgacaaagatgacatgcgactagcatctgaagtgttttcaaaagaactccaagatatgggtgatgaatacgctccagtcatatttgttgattcggttcattctgctgagtatgttccagtatctcatggtatgtcaatggtataaatatattaaagcatattaaagaggattaaaaatgactttattatctccgggcattgagctcaaagaaactacggttcaaagcaccgtggttaataactctactggtacagcagctttggccggtaaattccagtggggtcctgcttttcaaattaaacaggttacgaatgaagtagatttagttaatacttttggtcaacctacagctgaaactgctgactattttatgtctgcaatgaatttcttacaatacggaaatgatttgcgagttgtgcgtgctgtcgatagagataccgctaaaaactcatctccgattgccggtaatattgaatacactatttctaccccaggtagtaactacgcggttggagataaaatcacggttaagtatgtttcagaagatgttgaaacagaatgtaaagttaccgaagtagatgctgatggaaaaattaagaaaattaatattcctactgcaaaaattatcgctaaagctaaagaagtcggtgaatacccaacattaggttctaactggaccgcggaaatttcttcgtcttcctctggtttagctgcagtaataactcttggaaaaattattaccgattctggtattttattagctgaaattgaaaatgccgaagctgccatgacagctgttgactttcaagcaaatctcgaaaaatatggaattccaggagtagtagctctttatccaggcgagttgggcgataaaatcgaaattgaaatcgtatctaaagctgactacgcaaaaggtgcttctgcattacttccaatttatccaggcggcggcacacgcgcatctactgccaaagcagtgtttggatatggaccacaaactgattcacaatacgctattatagttcgtcgcaatgatgctattgttcaaagcgttgttctttcaacaaagcgtggtgaaaaagatatttacgatagtaacatctatattgatgactttttcgcaaaaggtggttcagaatatattttcgcaactgcacaaaactggccagaaggcttctctggaattttaactctgtctggtggtttatcatcaaatgctgaagtgacagcaggagatttgatggaagcttgggacttctttgctgaccgtgaatctgttgatgttcagttgtttattgcgggttcttgtgccggtgaatctttagaaacagcatctactgtccaaaaacacgtcgtttcaattggggatgctcgccaagattgcttagtactgtgctcaccaccgcgtgaaactgtagttggaattcctgtaactcgtgctgttgataacttagtcaattggagaactgcagcaggttcatacactgataataactttaatatcagttcaacctacgcagcaattgatggtaactacaagtatcagtatgacaaatataatgatgtgaatcgttgggttccattagcagctgatattgctggtttatgcgcgagaacagataacgtttctcagacttggatgtccccagctggttataatcgtggccaaattttgaacgttattaaacttgctattgaaactcgccaggcgcagcgcgatcgtttataccaagaagctatcaacccagtaactggtacaggtggtgatggttacgtattgtatggtgataaaacagctacttctgttccttctccatttgatcgtattaacgttcgtcgtctgtttaatatgttgaaaacgaatattggacgtagttcaaaatatcgtttgttcgaattaaacaacgcgtttactcgttcatcattccgcacagaaacttcccagtacttgcagggaattaaagctctcggtggaatttatgaatatcgtgtagtttgcgatacaacaaataacactccgtcagtaattgatagaaatgagtttgttgcaacattctacatccaaccggcgcgcagtataaattatattactttgaatttcgtcgcaactgctactggtgcagacttcgatgagttaactggtcttgcaggttaattgattatggggcttcggcccctattctcgaggaaacaagtgattatttctaagtttgttaaagtgaaaattgtaccatcaaattttaaacattatcaatcaaagggttataaattaacacctcttggagcggttaaacatggatttaggtattatgaaattgatgttaaagttgaagacattaaaggtagtaccgcgtatgtaaaatgccgttgcgataaatgtggaattgaatataaccaacgcattggaagaaacactgatatttgtcgtgattgccgtcataaagataaaatgcgcaataattcatatggttccgcgaataaaggaaaaacagtagaatgtatgcatggcgtaaatcatccaagatggaacccaaataaatctgaaatgcgtgaatatatttcattggtatataaagaaactcgtaagcataagaaaatttggtcaaaatggccaaatgctgataaaataggagtgtgcggtacaaaaggtgcttaccaacttgatcataaggtatctatcaaatacggttttgataatttaattcctgctaaaataattggcggtattaataatttagaaataatcacttgggaatctaaccgagaaaagtcaaaaagaaatagtgtagatctttgggatttactagaatgattctaaaggcctgtttcggcaggccatataaatacactatatccttaattctttaattctatatgccctaggttaaacatagggatataaatactacagaggctaatatgtttgtagatgatgtaacacgagcgtttgaatctggtgattttgctcgacctaacttattccaagtagaaatttcttatcttggacaaaattttacgtttcaatgtaaagccactgctttaccagctggtattgtagaaaaaattccagtcggattcatgaaccgtaaaattaacgtagcaggcgatcgtacattcgatgactggactattacagtaatgaacgatgaggcacatgatgctcgccagaagtttgttgattggcaaagcattgctgctgggcaagggaacgaaattactggtggaaaaccagcagaatataaaaagagcgctgttgttcgccaatatgctcgtgatgctaaaactgtaacaaaagaagtcgaaattaaaggcctgtggcctactaacgtgggtgaacttcaattagattgggattcaaacaatgaaatccaaacctttgaagtaactctcgctctcgattattgggaataaaatgaatggggagaaatccccatcctgcttaaagcagagaagtccattataaatataactataattcccatttggagaatacaatgaaatttaatgtattaagtttgtttgctccatgggctaaaatggacgaacgaaattttaaagaccaagaaaaagaagatcttgtttccattacagccccaaagcttgatgatggagcaagagaatttgaagtaagctcgaacgaagctgcttctccttataatgctgcattccaaacaatttttggttcatatgaaccaggaatgaaaactactcgtgagcttattgatacatatcgtaatctcatgaataactatgaagtagataatgcagtttcagaaatcgtttcagacgctatcgtctatgaagatgatactgaagtcgtagcgttaaatttggataaatctaaatttagtccaaaaattaaaaatatgatgttagatgaatttagcgatgtattaaatcatctatcgtttcaacgaaaaggttctgatcattttagacgttggtatgtcgattcaagaattttctttcacaaaattattgatccaaaacgtccaaaagaaggcataaaggaattacgtagattagaccctcgtcaagttcagtatgttcgtgaaattataacagaaactgaagctggcacaaaaatagttaaaggttacaaagagtattttatatatgatactgcacacgaatcatatgcatgtgatggtagaatgtatgaagctggcacaaaaataaaaattcctaaagctgccgtcgtttatgcccattctggattagtcgattgctgtggtaaaaatatcatcgggtatttgcatcgtgctgttaaacctgctaaccaattaaaattattagaagatgctgtagtcatttatcgtattactcgtgctcctgaccgtcgtgtttggtatgtagacacaggtaatatgcctgctcgtaaagctgccgagcacatgcaacatgtcatgaacacgatgaaaaaccgtgtagtatatgatgcatcaacaggtaaaataaaaaatcaacagcataatatgtctatgaccgaagactattggttgcagcgccgtgatggtaaagctgtgacagaagttgatactcttcctggtgctgataataccggtaatatggaagatgttcgttggtttagacaagctctttatatggcattacgtgttcctctttcacgcattccgcaagaccaacaaggcggtgtgatgtttgattctggaactagcattacacgtgatgaattaacgtttgctaaatttattcgtgagttacagcacaagtttgaagaagttttcctagatccgcttaaaacaaatcttttgcttaaaggtataatcacagaagatgagtggaatgatgaaataaataatattaagatagaatttcatcgggatagctactttactgaactcaaagaagcagaaattttggaacgaagaattaatatgctaaccatggcagaaccatttattggtaaatatatttctcacagaactgctatgaaagatattttgcagatgactgatgaagaaatagaacaagaagccaagcaaattgaagaagagtctaaagaggctcgtttccaagaccccgaccaagaacaagaggatttttaatggaaggtttaattgaagctattaaatcaaacgacctcgtagccgctcgtaaattctttgctgaagccatggctgcaagaacgattgatttaattaaagaagaaaaaatcgctatcgctcgtaatttcttaatcgaaggtgaagaacccgatgatgaggatgatgaagacgaggatgatgacgaagatagcgatgataaagacgacaaaaaagacaaagactctgacgaagatgacgaagacgaggatgatgaataatgcttctgatccctgaaactcatgaattagttctcgagaatgtcgaagcacttattcctgaagcacagggtcgctttgacgaattgtcttctgctttaaataaagacgatataaatacaattgtcgagaatatgcttgatgatgaaactgatttagcaattgcattagcttctattaatgaagatatgccgctaaacgaattcatcgttaaacatgtttctgctcgtggtgaaattacacgtaccaaagaccgcaaaacgcgtgaacgtaatgcatttcaaaccaccgggctgtctaaagcaaaacgtagacaaattgctcgcaaagctaccaaaacgaagattgccaacccagcaggtcaatctcgtgctcagcgtaagcgtaaaaaagctcttaaacgccgtaaagcattaggattaagctaatgaatgaaccccaattactaattgaaacttggggtcaacctggcgaaattattgatggcgtgccaatgcttgaatctcatgatggaaaagacctaggtttaaaacctggtttatacatcgaaggaatattcatgcaagcggaagtcgtcaatagaaataaacgtctttatccaaaacgcatattagaaaaagcggtaaaagactatatcaatgagcaagttttaactaaacaagctctcggagaattaaatcatcctccacgcgctaatgttgacccgatgcaagccgctatcattatagaagatatgtggtggaaaggaaatgacgtatacggacgagctcgtgttattgaaggtgaccatggtcctggagataaattagcagctaatattcgtgccggatggattccaggagtttcttctcgtggattaggttcattgactgacacaaataaaggttatcgtatcgtaaacgaaggattcaaattaactgtaggtgttgatgcagtatggggtccaagtgctccagatgcatgggtaactcctaaggaaattaccgaatcacagacggcggaagccgatacaagtgccgatgacgcctatatggctctcgcagaggccatgaaaaaagcgttataaatattattatctaaacaacaggactacaaaatgcttaaagaacaactgattgctgaagcgcaaaaaattgatgcttccgttgctcttgatagtattttcgaatcagttaatatttctccggaagcaaaagaaactttcggcactgtattcgaagctaccgtcaagcagcacgccgttaaattagctgaatctcatatcgctaaaattgctgaaaaagcagaagaagaagtagaaaaaaataaagaagaagccgaagaaaaagctgagaagaaaatcgctgagcaagcttctaaattcatcgaccatcttgcgaaagaatggctcgctgaaaataaattagcagttgataaaggcatcaaagccgaactgtttgaatccatgcttggtggattaaaagagctctttgttgaacacaacgttgttgttccagaagaatcagttgatgttgtagctgaaatggaagaagagctgcaagaacataaagaagaatcagctcgtctgttcgaagaactcaatatgcgcgacgcatatatcaattatgtgcagcgtgaagtggcattgagcgaaagtactaaagatctgactgagtctcaaaaagaaaaagtctctgctctggtcgaaggtatggattattcagatgcattctcaagtaaattgagtgccatcgtagaaatggtgaagaagtctaataaagatgaaagcactattactgagggtataaatactcctgatactgaagcagccggactgaatttcgtcactgaagctgtagaagataaagctgcacctggtgcagaagatattgtaagtgtatatgcgaaagtcgcatctcgtttctaattttaaaggttaacacaaatgactatcaaaactaaagctgaacttttgaacaaatggaagccattactggaaggtgaaggtttaccggaaattgctaatagcaaacaagcgattatcgctaaaatctttgaaaaccaggaaaaagatttccagacagctccagaatacaaagacgaaaaaatcgctcaggcgtttggttctttcttaacagaagctgaaatcggtggtgaccacggttacaacgctactaacatcgctgctggtcagacttctggcgcagtaactcagattggcccagctgttatgggtatggtacgtcgtgctattcctaacctgattgctttcgatatttgcggtgttcagccgatgaacagcccgactggccaggtattcgcactgcgcgcagtatatggtaaagacccaatcgctgccggtgctaaagaagcattccacccaatgtatggtccagatgcaatgttctctggtcagggtgctgctaagaaattcccagctctggctgctagcacgcaaactacagtaggtgatatctatactcacttcttccaggacactggtactgtgtatctgcaagcttctgctcaagtaacaattagttctactgcagatgacgcagctaaattagatgctgaaattaagaaacaaatggaagctggtgtactggtagaaatcgctgaaggtatggctacttctatcgctgaacttcaggaaggtttcaacggttctaccgataacccatggaatgaaatgggcttccgtattgataaacaagttatcgaagctaaatctcgtcagctgaaagctgcttactctatcgaattagcacaagacctccgcgctgttcacggtatggatgctgatgctgaactgtctggtattctggctaccgaaatcatgctggaaatcaaccgtgaagttgttgattggattaactactcagctcaggttggtaaatctggtatgaccctgactccgggttctaaagctggtgtatttgacttccaggatccgattgatattcgtggtgctcgctgggcgggtgaatcctttaaagctctgttgttccagattgacaaagaagcagttgaaattgctcgtcagaccggtcgtggtgaaggtaacttcattatcgcttcccgtaacgtagttaacgttctggcttcagttgatactggcatttcttatgctgcacagggtctggctaccggctttaacactgatactaccaagtcagtatttgctggtgttctgggtggtaaataccgtgtatatatcgaccagtatgctaaacaggattatttcactgtaggttataaaggtccgaacgaaatggatgctggtatttactacgctccatatgtagctctgactccgctgcgtggttccgatccgaagaacttccaaccagtaatgggattcaaaactcgttacggtatcggtatcaacccatttgcagaatccgctgctcaggctccggcttctcgcatccagagcggtatgccttctattctgaatagccttggtaaaaacgcttacttccgccgtgtatatgttaaaggtatctaatctttgacgatttaagggaccttcgggtccctttagttgtttttatggtataaataaatcatataaaccaaaaggaaagcgcaatggctaaaatcaacgaacttctgcgcgaatcaaccacaacgaatagcaactcaatcggtcgcccaaatctcgttgctttgactcgcgctaccactaaattaatatattctgacattgtagcaacgcaaagaactaatcaacctgttgctgctttttatggtatcaaataccttaacccagataacgaatttacatttaaaactggtgctacttacgctggcgaagctggatacgtagaccgagaacaaatcacagaattaacagaagagtctaaattaactctcaataaaggcgatttattcaaatataataatatcgtttataaagtattagaagatacaccatttgctgatattgaagaaaacgatttagaattagctcttcagattgcaatcgttcttttaaaggttcgtctattttctgatgctgcagtaacaagcaaatttgaaagctctgatagtgaaattgcggatgctagattccagattaataaatggcaaaccgcagttaaatctcgtaaacttaaaactggcatcacagttgaattagcacaagatttagaagcaaatggattcgatgctcctaatttcttggaagatttgcttgcaaccgaaatggcggatgaaatcaataaagatattctgcagtctttgattacagtgtcaaaacgctataaagttacaggaattactgatactggattcattgatttgagttatgcatctgcacctgaagctggtcgttcattataccgaatggtatgtgaaatggtttcacatatccagaaagaatcaacttatacagcaacgttctgtgttgcttcagctcgtgccgctgcgattcttgctgcatcaggttggttaaaacataaaccagaagatgacaaatatctttcacaaaatgcctacgggttcttagctaatggtttaccgctttattgcgataccaacagcccattagattatgtaatcgttggcgtagtagaaaatatcggtgaaaaagaaattgttggatcaattttctatgctccgtatacagaaggtcttgacttagatgaccctgaacatgtaggtgcatttaaagttgtagttgatccagaaagtttgcagccatctatcggtttattagttagatatgctttatctgcaaatccttacactgtagcaaaagatgaaaaagaagcaagagtaattgatggtggagacatggataaaatggcgggtcgttcagatttgtctgttttattaggtgttaagctaccaaaaattatcattgatgaataaaacaaagggacctttcggtccctttttatttaacttaccaattcaatccaagccggacgaagtacatcttgtaccattttaactaattccttcttaatcaaagaaggattatccgcttgagttagagtaataccttcacgagaagtttcttccaaaatatcttgaaccgttagtcccatcacctttccaaaatcttttggaccgatttcgccaattttagaaataacgttatttactcggttcagtgtaacgtaacaagctaaaattcccagcaatttattatcagcttctgacagttcaactttagctttaataggcttatcagactttttcttttcgctaaatttagagttcttgcatttgatagctacgcgattgccattaggcatccaagaaggataacaaggtttcaatacatatccttcagcagtaaatacttcgccttttgcttcggcattccaaacgcatttatttgcatcaactaatccagcatggtctaccgtaaaattataatcctgtacgacagaatctaaatcatttggcaatttaatcagctcttcaaatttaccacgacctaaaagtggagccattttaaatttaaatgtattacagaatgattccatcatataatcatcgacataagtcacatcaccactttcggtagtaacaataatgtcaaatacataaaaatctttatcaccataatcgacattcttctgaatgccaggtccggcgaattcaccaaagacttgataagatacaaccgctgaagtttccataatttcttgtactgctttaatggaatcagcgtaattcttcaaaataatttcatacccaaagaaatcttcagcaggaagaataggaccagtgcgtttagcacaagttactttatcacgctcaataatcaacgagaaatttgtgccatgaatcttttcacgagctacccattcgccgccagtcaatcctaaactgtaaagtttttcaatgaatttagaattgtaatgattttcaagactgctatactttttaaacataattaatcctcaaaatgtaatttctaaccaatcaccatcacgctgatcactattgactttaaagctaaatccttcttttctcagccaatcaccaatttcttcagtaatcaatttatcgcgagcagtacaataataactaaaatatgttttaccttgttcagctgctttattagcaagttccgaaaaatctttaataaaacactctagcttaaactgtttacttttaagtgctttttcgcgtaatcgattagcaaaagattcattttcataaagatcatactgttccatttttcacctttttattaatatgcctttttctatagacaactttttctcgagtttcaaatttattcttagcagtcatagctcgagcccataatacagccacttcttttgcctgtaagttcaattcacgagcaatttcaatgaatgactttccagactcatgaagagtaaacaccacaacctcagttctcataatcaatctcatgttatcgagttggtgccattatatacatcattttctgagtgtgttttgtgtgctttcaaaatgaagaaaggggccgaagccccttatgattatggataggtatagatgataccagtttctaaagcagttttatgaatgatgtatccattacgtgattcttgaacatcaacttctggatagtctttcatcatcttctgaagagtgtaacgatgcaggtagtatttactatctggatcttcagttttccaatctttaccttcttcggtcattttttggatttcatccataacccaccaaccgcaccagatataagctgaagtacgatgtggaagaggatgaacataaggcaattcaccttctggttctggagcaactttatcagttacctgaacttgaccttctgctgtgatagttttgctatcataatcagtggcagtaacagttgcagtaacttcaatagtttgacttccaatagatgatgtatcaaccgtgtatacattagttgacccttctactggagaagaatctttcttccatgaatattcgatttgtgcttcttctggagcatccgtaacattagcagtaaatgtagccgaagcatcttgctgaacgttaatagaaggaggagtcaatgtaacttgtggattcattgtcttcttattaactgtcaatgatacttcattagaagtaacttccttttcattgtaattttctgccgttacttgcgctacgcatttaattctttttactccacttgtagttggagtatagttaaatgtagagttagtttctccaccaacttgtgaatcatctacataccatttatatgtagcagacgctccatcaggttgagaaaccaaggcagcagtaaattgaactggggttccaattactccagctgaaggactatcaggagttactgctaaggtagttgtctgcgtctttttattaacagtcagtgacacttcattggaagtaacttcctttgtatcataatctgtcgcggttacttgagctacacacttaattgttttaactccgcttgtgtcaggagtgtaattgaatgtagcgtcagttgcttcgcttacaggagaaccgtcaacgtgccattgatacgtagcagatgcgcctggcggctgtgaagctaaggcagcggtaaattgaacggctgttccgattactccttccggaggactagcaggagttacggctaatgtagttgtctgtgttttattttgaaccgtgatagttgtactaatttcagctgtttcaggttcagattctgcaacttgattggttgcaacgactttaatagtcttttgaccggcaggtccttttagtacataactaaaagttgctgacgtttcttcctgcggagcgtcgtctacagtccaagcatatgtaatagttccaccttcagtttgaccactgggtgcagcagtaaactgcttagtttcatcaataactccagtaggtgttttaggagttatatcaactgtaaaagccataagttatccttattttaatgttacgaaagaagaattacgtgtttcacgaattagaactgatccgtcacgattaatgtagtaaattaagctaaataaagtttggtgtgccgacgcatgttcaaaactagttgggtgagatttccaatccggagtttcagcaatccactggtaaatccaccaaggaacagtgcagaatcctggattttttccaatcagctgaagattcggactaaagttttccggaagagtaaatacagacggcttttcagattcaataatctcagctacagcctgctcgaatttttcttcaacaaaaggagtatcttcaatcaaaacatcggtattttcaagaattttatccgtttctactacttcaattttaatgtcagatttaaccggagaatcaatcagaagtgctgcctctggattgacttcttcatcgtcatattttaatccgtctgcagcatcagcagcatcaattaagtctttaatagataacccatcagtctctggcataggttcactagcgagcttctggagggcttcttcaatatcattaacgatattatcaaaagatttattctttttgacctttataccaaactgttcagcatattcagctaatttagctttagcttctttattatcatcaagagccttcagctctgcaatataatctttatctatcataatatttcctcagtataaatatagatatatttattactcggaaaatagtatgtaccactttgtatatgaaacaacaaatctaataaatggtaaaaagtatataggaaaacactctactgatgacttgaatgatggttaccttggttccggtaaggcaattcagcaggctataaagaaatatggtgaaaacaatttctctagaacaatactaaaagagtttaaaacttccgaagaagcgtacatgtatgaagaagaaattataactcctgaaataataaaaagcaaaaattattataatatgaaacctggtggaattggtggaattgttatgactacagaggttatagcaaagatgaaagaatcttccgctaagagatttgaaaactcaccgggcacggtattaggtacaacttgttacactaatggaactaaaaatatttttattaaacctggagaacttgttccagaaggatttgtaaaagggatggttcatcctaatagaaagtccagaaaaggatgtaaagtcaaaccgactaccacaggaactttttgggtcaataatggcgtaataaataaattaatacaaccagacggtattattcccgacggatttattaaaggtcgtctcatgaaaagagattctaaaggcaaatttagtaaggcataattatggatattaaagtacattttcacgacttcagtcatgtacgcatcgattgtgaagagagcacgttccacgaattaagagatttcttttcgtttgaggccgatggatatagatttaaccctcgcttcagatatggcaactgggatggacgaatccgtcttttagattataatcgtcttcttccattcggcttagttgggcaaattaaaaagttctgcgataactttggctataaagcctggattgacccacagattaacgaaaaagaagaattatcaagaaaagattttgatgaatggctttctaaattagaaatctattcaggaaataaaagaattgaaccgcattggtatcaaaaagatgcagtgttcgaaggattagttaatcgtcgtagaattcttaatcttccaacatccgcaggtaaatctttaattcaagctttgctcgctcggtattatttggaaaattatgaaggtaaaattcttatcattgttccaacaactgctctgacaactcagatggctgatgactttgttgactatcgtttattcagtcatgcaatgataaagaaaatcggtggtggagcatcaaaagatgataaatataaaaatgatgcaccagtcgttgttggtacatggcaaactgtagtaaaacaaccgaaagaatggttctcacagtttggaatgatgatgaatgatgaatgccatcttgctacaggaaaaagtatttcatctatcatatcaggtttaaataactgtatgtttaaatttggtttgtctggttcattacgtgatggcaaagccaatataatgcagtatgttggaatgtttggtgaaatatttaagccagtaacgacctctaaattaatggaagatggacaagtaactgagttaaaaattaatagtatttttcttcgctatcccgatgagttcactactaaattaaagggaaaaacttaccaagaagaaataaaaattattactggactcagtaaaagaaataaatggatcgctaaattagctattaagcttgcacaaaaagatgaaaacgcttttgtcatgtttaaacacgtatcgcacggtaaagctattttcgatttaattaaaaatgaatacgataaagtttattacgtatcaggggaagttgataccgaaacccgcaacgtaatgaaaaccttagctgaaaacggtaaaggaataattatagtagctagttatggtgtattttctactggtatttcagttaaaaatctgcatcacgttgttttagcgcacggtgttaaatctaaaattattgtattgcaaacaatcggtcgtgtattacgtaagcatggttctaagacaatagcaacagtttgggacctcatagatgattgtggtgttaagccaaaatctgctaatacgaaaaagaaatatgttcatttgaactatcttttaaaacacggcattgatcgtattcagcgctacgcagatgaaaaatttaattacgtaatgaaaacagttaatttataagggctccggccctttggagaaaaagatgttactagaatttaaacaatttctttatgaagcttctattgatgaatttatgggtaaaattgcctcttgtcaaacattagaaggtctagaagaacttgaagcttattataagaaaagagttaaagaaactgaattaaaagatactgatgacatctctgtgagagatgctttggcaggaaaaagagctgaattagaagattcagacgatgaagtagaagaaagcttttaaattaaaaaaggcccaaccaaaaaggaagggccaaaactatagactaaaggtcacactatagcaaaagttgtgtttcatttaattgttcttccgaactttctgaaactggtagttctttaatgtaattataacaaggcccaggatgtacaggacctttgtctgtttcaacaaccaatgcagaatcgattggagttttacagacaacgcaaatcttatctgacatgattgtctcctctaaattatatatctatttatataactctcatatgcatatcaatgcccatatctttagaataaaaatattcatcaagatatccagcaaattttcctttaacataaagtacatcttcaccgcatgggtggtcggccaggatacgaatatcctgacgcttgagattatactttttcattaagaattgaatttccgtttcgaattcttcttcataattaaaagcatcatcaatgctatatttcattattttccagcctcaaatgctcgcatgtcttgaatatgcttaatagcaaatccgcgtgatttaatagcatcaagagctccgctacagaaatccaataaaattccccaatattgtaatgaagtatcaacttttaaaacatccttatcagctgatagaactgtcttcatttctgatttctcataacggtccatactaaattcatcaccatctcctcgtcccgagtagtagtctaatttagctttaagagcaacttttttctgtgcttcaattctaagcatttcctttttaatacttgaatgcttattaagccatttactatataacatcacattattagctgcttcatactgtaatttagtcgaatctataaacacatctttcttcaattcttcttgaagatcttctaatttcatattgttctctattcaattgttattggatggacttagattcattataccacgtttatacgtgaagcattatactctgttactggaagctagttgcagttttatctgctcaatatcatcagggttatcgatgaccgaaaagcgtatttctactatcagagtataatcatcataaactggtattacattaactgctaatttatcaatacgtggctcgtagtttcttactgcgctttcaatgttacgctcaacagtatcagcagtaagaggagtcatattctcaaaaagctggtcagataaatcacatccaaattccgggtcaaatggccttgaccctttcctggttgtaataattcctaaaaggctatttttaattgaccttaatccaagagatctggaaacgtctttgtcccaatccattttcatttctgggtcaatgtcagaataaagcttattaatatttgccattacaatagctcaaagaattctttgagtcctcttattacatgagcgtgagtttttccacactctggacacttaattggaacagccaaataaacagtaggctttaaaagcatatcttttatagctacaatatctgactctgtgatgatagaatataaatcttccaattctttttcatttaagtcttcaactggaatgctttcaccgttagcatgaatcgtttctatacatgatactatcatgtgggctatatttttatcatcaaaaattttagggtaatggaacttaattttaatgtcacccagtgtataccagaggtcttctggtgcatctatttgtgtatgtaatagatttatatgggttggtatttcagttccacaggtgcacttccaggagttttcgtgattaacttctccaagagaatgtgcccataaatgaatcagcagtagttctgattcttggcggtttaaatcttttgcatttgtacagtctttgattagctttttaacgatctcttctactgaaccgttctttttagcagtaataagttctagatattctttaagagtaaatgcgcgacagttgattattttagaaccaactctcacgtcaaatttgtattcatacatatttagctcctttatttatcatatttataaatagaataaaaggagcatctatggcaaacattattcgttgtaaattaccagatggtgttcatcgttttaaaccatttacggtagaagattatcgagattttttgttagttcgaaacgatatagaacatcggtcaccacaagaacaaaaagaaataattgctgatttaattgccgattattttggagactatccgaagacttggcaaccatttatatttttgcaggtatttgtagggtcaataggtaaaactaaagtaccggtcacatttgtatgtccaaaatgtaaaaaagaaaagacagttccatttgaaatatatcaaaaagaattaaaggagcctgtttttgatgtagctaatgttaaaattaaattaaagtttccttctgagttttatgaaaataaagcaaagatgattactgaaaatattcattctgttcaagtagatgaaatatggtatgattggaaggaaattagtgaatcgagtcaaatagaacttgttgatgccatcgagatagaaacattagaaaaaattctcgatgcaatgaatcctattaatttaacattgcatatgtcatgttgtaataagtatgtaaaaaaatacactgatatagtagatgtgtttaagctattagttaacccagatgaaatatttactttttatcaaatcaatcacacgctcgtaaaaagtaattatagcttaaattcaataatgaaaatgattcctgctgagcgcggattcgtattaaaactgattgagaaggataaacaataatgagtatgttgcaacgcccaggatatccaaatctcagcgttaaattatttgatagctacgacgcttggagtaataatagatttgttgaattagctgctactattaccacattaactatgcgggattctctttatggccgaaatgaaggaatgctgcagttttatgattctaaaaatatccatacaaaaatggatggaaatgaaataattcagatttctgtagctaacgcaaacgatattaataatgttaaaacacgaatttatggatgtaagcatttttccgtgtcagtagattcaaagggtgataacatcattgctattgaattgggaactattcattctatagaaaatcttaaatttggcagaccgtttttctctgatgcaggtgaatctataaaggaaatgcttggtgtcatttatcaggatcgcacgttattaactccagcaataaatgctataaatgcttatgttcctgatattccatggactagcacatttgaaaactatttgtcgtatgtcagggaagttgctctagctgtaggaagtgacaaatttgtatttgtgtggcaagacatcatgggagttaacatgatggactatgatatgatgataaatcaagaaccgtatccaatgattgtcggtgagccatctttaataggtcaattcatccaagaattaaaatatccattagcatatgatttcgtttggttgactaaatcgaatcctcataaacgtgacccaatgaaaaacgctactatctatgcgcattcatttttagattcttcattgccaatgattactacaggaaagggagaaaactctattgtagtgtcaaggtcaggtgcttattctgaaatgacttataggaatggctatgaagaagctattcgtcttcaaactatggcgcaatatgacggttatgctaaatgttctactgtcggtaattttaacttgactcctggcgttaaaattatttttaatgatagtaaaaaccaatttaaaacagaattttacgttgatgaagttatccacgaattatctaataataattcagtaactcatctatatatgttcactaatgcaacgaaactggaaacaatagacccagttaaggttaaaaatgaatttaaatctgatactaccactgaagaaagtagttcttccaataagcaataaagaagtttctattcctaaaatgggtcttaaacattataacattttaaaggatgttaaaggtcctgatgaaaatttaaaacttcttattgattctatttgcccgaatttatcaccagcagaagttgatttcgtttccattcatttattggaatttaatggaaagattaaatctcgtaaagaaatagatggttatacttatgacattaatgatgtttatgtatgccaaagattagaatttcaataccaaggaaatacattttattttagacctcctggaaaatttgaacaatttttaacggtgagcgatatgttatcaaaatgcttgcttaaggtcaacgatgaagttaaagaaattaattttcttgagatgccagcattcgttttaaaatgggcaaatgatatttttacaactttagcaattcctggccctaatggtccaataaccggaattggcaatattattggattatttgaatgaaaaagccacaagaaatgcaaacgatgcgtagaaaagttatttcagataataaaccaacacaggaagcggctaaatccgcttctaacactttatctggacttaacgatatatctacgaaattggatgatgctcaagctgcttctgaattaattgctcaaactgttgaagaaaaatcgaatgaaataattggagcaattgacagtgtagaaagcgcagtgagtgatactactgctggttctgagttaattgctgaaactgtcgaaattggcaacaatattaataaagaaatcggtgaatcactcggaagtaaattagataaattaacgagtttactcgagcaaaaaatccagacagccggaattcaacaaacaggaactagtttagctacggttgaaagcgctattcctgttaaagttgttgaggacgatacagctgaatccgtgggtcctttattaccagctcctgaagcagttaataatgatcctgatgctgattttttccctacccctcaaccagttgaacctaaacaagaatcgccagaagaaaaacagaaaaaagacgcatttaacttaaaattatctcaagctttagataaattaacaaagactgttgatttcggatttaagaaatctatttcaattactgataaaatatcaagcatgctatttaagtataccgtcagtgctgctattgaagctgctaaaatgactgcaatgatattggctgttgttgttggaatagacctgttgatggttcatttcaaatattggtcagataaattttcgcaggcttgggatttgtttagtacagactttactaaattctctagcgaaaccggaacgtggggtcctttattacagagcatctttagttctatcgatgaaattaaaaaattctgggaagagggagattggggcggtttgacggtagctattgtagaagggcttggaaaggttctttataatttaggagaacttattcagcttggaatggctaaattatctgctgcaattcttcgagtcattcctggtatgaaggatactgctgatgaagtagaaggaagagcgctggaaaatttccaaaattctactggagcatctctcaataaagaagaccaagaaaaagtagcaaattatcaagataaacgaatgaatgacgatcttggtccaatagcaaaaggattagataaaattgctaattggaaaacccgtgcatctaactggattcgtggcgttgataataaagaagcattgacaaccgatgaagaacgcgcagcagaagaagaaaaattaaagcaactttcacctgaagaaagaaaaaatgctttaatgaaagctaatgaagctcgtgccgcgatgattcgttttgaaaaatacgctgattcggctgatatgagtaaagactcaacggttaaatcagttgaagctgcctatgaagatcttaaaaaacgaatggatgacccggatttaaataattcaccggcagttaaaaaagaacttgctgctagattttctaaaattgatgctacttatcaagagctcaagaaaaatcagcctaatgccaaacctgaaacttctgctaaatcgccagaagcaaaacaagtccaggtaatagaaaagaacaaagcacagcaagctcctgttcaacaagcatctccttcaatcaataatactaataatgttattaagaaaaatactgtcgttcataatatgacacccgtaacgagcacgactgctcctggtgtatttgatgcgactggagttaattaaggaataatatggcaattgttaaagaaataactgctgatttaattaaaaagtccggtgagaaaatttcagccggacagagtactaaatcagaagtagtaactaaaacatacactgcccagtttccaactgggcgtgctagtggtaatgacactacaggggacttccaggtaacagatctatataagaatggattattatttactgcatacaatatgtcatctagggattctggaagtcttagatcgatgagatctaactactcttcttcatcttcgagtattttaagtacagctagaaacactattagtagtacagtatcaaaactatcaaatggattaatatcaaataataattcaggaacaataagtaaagctcctgtcgcaaacattcttttaccgagatctaaatctgacgttgatacgtcatcacatagatttaacgatgttcaagaaagtcttatcagcagaggcggaggtactgctactggtgtgttaagtaatattgcttcaactgcagtatttggggcactggaaagtataacacaaggtataatggctgataataatgaacagatttatacgacagccagaagtatgtatggtggcgctgagaatagaactaaagtgtttacatgggatttgactccacgttcaacagaagatttgatggctattatcaatatctatcaatattttaactatttttcttatggcgaaacgggcaaatctcaatatgctgctgaaataaaggggtatttggatgattggtatcgttctacgttaattgaacctttatctccggaagacgcagctaaaaataaaacactatttgagaaaatgacatcgagcttaactaacgttctagtagtttcaaacccgacaatttggatggtgaaaaactttggtgcaacatctaagtttgatggaaaaacggaaatatttggcccatgccaaatacagagcatcagatttgataaaacacctaatggtaactttaacggattagctattgctccaaacctccctagtacatttactcttgagattactatgagagaaattatcacgttaaaccgtgcttctttatatgcggggactttttaatgtattctttagaggaatttaataatcaagcaataaacgcagatttccaacgtaataatatgtttagctgcgtttttgcgacaactccatcaactaaaagctcttcgttgataagttcaattagcaacttttcttataataacttgggtctaaattcagactggttaggattgactcaaggcgatattaatcagggaattaccacgctaattactgctggcacacaaaaactgataagaaaatcaggggttagtaaatatcttattggtgccatgagtcaacgtacagttcaaagtttattgggctcatttacagttggtacatatttaattgacttctttaatatggcgtataattcatctggattgatgatatactctgtaaaaatgccagagaatagattatcctatgaaactgactggaactataactctcctaatattcgtataactgggagagaattagaccctttggttatttcatttagaatggattcagaagcttgtaactatcgtgcaatgcaagactgggttaacgctgttcaagacccagtaactggactgcgtgctttgccgcaagatgtcgaggcagatattcaggttaatcttcatgctcgtaatggattacctcatactgcagtgatgttcaccggatgcattccagtgtcagtgagcgctcctgaactatcatatgatggagataaccaaataactacatttgatgttacttttgcgtatagagtcatgcaggctgggtcggttgatagacaagctgcgcttgagtggcttgaatctgctgctataaacggtattcaaagcgttctcggaaatagtggaggtgttactggattatctaattcgctttcacgacttagtagattaggaggaactgctggaagcatttcaaacattaatactatgacgggaattgtcaactcgcaaagtaaaatattaggagcaatataacaatggggaccgaacggtccccatatttttatttgcggaatgaaataaaagcagcaactgaagcaactaaactgtcttcaatataaacttcaatttttaccggagcttctgactcaaatttacctgttactacaccctggaaaatgctttcagtctgttctggctttgaaaaattttcagaaggaaaaattccgaactttttatctgttccaaaaattttgataaattcatcataaactgcttcattaaaagcgttatcagcaggaataacgccttcaactacaagttcttgacctaaaaagcgtaaagaagatttcattttgtgttcctcatgttatgtcagtaaaactactataacacaacacgagggacttgtaaactacatcttgaactttttagacattccgttgatgttaaccaaagaagccaagatttgagaaacttcgttttcctcttcttttgattcttctacaaggaattgattaaacccagccattggacgaacttcaccagtttccattagatgatcgccatcatataccgattcttctaattgttcagaaggaggaacgattgtgccttcgattagatacttattataagcagtttctttcatcatgtacgtgctcactttattaatcttcagcaaaattccacgcggtagaataacttcagcttctgatggaaatcctgataaatgacctggaacgataactttaattcgctcagctccttttattaccatacctacgctagtttcagcatcttcattcgcataagcagaatgactgcccatatgcattaaatcttcagcatcaacagaaccttctccttcaccagaaaatactgcaccggaatcatctagagccatatagtttttaccatgctcaccgaagatatttggtttaagcgatgtggatacgaagttcttgaaatagaacattttattttcaatattatggcgtaaagttttaaaagtaacttcttgtccacgataaagcgtagttcctggaggaagaactgatccttttgcgaatgcagaatccagcgtctcgatgtgtttaatagctcgttccatgtattcttcacgggtagaatctggtttacccaagaggaacgagttcatttcaacatatgaatctgcacaataatcttcaattacatcagactcagcctgagttaatccttttggagttacttcggtgcttgcatattcatatgcctgagcagcagattcattaatcaatttataaatgccattcatgacaaattgaataatagctaccttttcgtctggcgtggctttagaacctttaactaaatcattgataattttcttaataacatcaaagctattagaaatattaatgtcagcgagatcgctcaaaattttatctgttttataatcaaagaattctttattctttaaatattcttgagaaccttgatgtgttatatcgctctgcagtctgatagacggatcacgtaaacgcgcatgggccaatgcaatatgatttcggaagttttctagttcataatcgttagatttaaaacgagaagcacttctcataccaccaatagctcctttgccgaagttggaaccaatctgaataacaccagagttcattggtccttctgctttatataccggaactttagattcaaactcttgatatttcttggcagcgaagctatcaccctgaagcgaagcatcgacagtagaatattgagcttgtgctgctaatcgacgactaattttagttttctgaataacagcttgatccgtgcgcttatcattttctaaagcaatagaagcagcaacagcaacagctttaggaacagcattacctgttttaacatctacataaacatcaccaacctttgattcaacttttgtgaataactcagttgaaataggaggtacacctggaatgtcttctaaattggcatttttacggtaaaccataatatatgcatactttttatcataatcccagatttcctttaaaagaacatatcgacctgctcctttagtacgtactaaacggtcagcaataacttgcatttgacgagcagctccatttgttttactttttagtacgcggaataggcatgcgtcaattttatactgtttcattgtttgaagagcagtatcaaaaaccgcattaatgacaccaattggatttccacccaagtttttaagtttaactaatgatagtttctcattaacacctatcattacgatatgcatcattttatcgcctggcttaacgtttttatttgtatcaccgccagaggtgtatgtacaaaatctaaatccaggaagcacactttcttcgccggcttgaatagcaaaaatttgaggtattttgtgcttaggatttaagttaacaaccggcgccgaagcgccgtcaaataattctataataagttccatgatttatccttgaacgaacttgtaaggcatgtttgtaatatctatgcaagacgcaataattccaagagatgattctactttttgtttaacatttgatgaaacaaatgatgcaaagtcaactctgtcttctatttcaatatcacctgtcattgcaactacttcaccagtttccattagacggtcaccgtcataaattactgattcggtgagttcttccgtagtcataacttcagcttgaatgagttttgtattattagatgttgttccgtcgttattagaagcatcagttattttattgactttgaccatcaatccgcgtggtagaataacttcagcttctgttgctattccgagacttcctggatatacaacattaactttatgagctccatcaattgcccatcctatttgaactttaacgtattcaggattttctttatacgctcttatttcgtttggattaatagttattccttcttcatttttatcaactgttaattcattacgagcttctggttctaaaagaccaataccagcatgtgtaattccaaaacgtccaaaaatgataggagttaaagaagtagatacaaaatttctgaaatagaatactttatttttaactagtgcttcgtatataggagcagtcatactttgagcacgataaactgtaatgccttctggtatacggtcaccattttcaaaagctgaatctaagttatttatagcagattcaatttctttttcactcattacatcatatcgttctggattgtagcgtcctaaaagaagattattgatgtcagtatatcctgaaccgcaatactctctaatgccgcgcttttgtgatggagtatatttagaaccatcacgggcaatagtaatatcaatcattggacctgcaccaattccagaaaagctataaatcattcgtttgaggaatttagtttttgctgcgttccaggaatttttagttatttcttcccagacttcatctggctgtcctttacgagttttattatgtttatcaagccaattatctttatattcttcaaagaattgattaacggctgctgcgtatttctccaaacattttattgaagtagttggttcatttttaatcgcattaagaattacatctttaattttttcagaaacttcattaacctcactttttgaaaagaatttatagtcataatgaagttcatctgcagttccttcggcaatgatttttgctgccttagttttagaagctaatgaattaattccaagcttcatttcttctgcttcgggaattaaaggagctgtagcaggtttattgaaattagctgcggtagattcatacttctggaataattcactttcaaatctagaagattccagcgattgactttgtgcaattgctctacgggaaattttaactttaacgattacagcttggtcagaacgtttatcgttttcttgtgcaatagatgctgcaattgcctcatttttagttacttgaactccagtatctttattgatataaacgtcgccgaccttcgattcaactttagtaaagagctcggtactaatttccggaactcctggaatgtcttctagtgatacatttttgcgatgtataagaatatatgcatactttttatcataatcccagagttccttaagaaggacgtatctgccacctgaacgactacggataagtctatcagcaataacttgaatttgtcgagcttgaccagcagttttagacttaagaatacgaagcatgcaggcatcaattttatactgacgcatcgtccgcattgcaacagtaaaaactgaattgatgtaattaattgggcttggaccgagaccttttaatttagcaattgaacctttagcagttaatgtaaaaggaacaatatgcatcattttatcgcccatttttaaatcgcgattagtatcacctccagatgtataggtacataaacgaaagcctggttgttcaattgcatcatcaacatgaactgaaaaaatttgtggtattttcttctttggatttaagtttgtaatcggaagagtagtatcttcgtcaaataattctgtaataagttccatcatatcctctctagtgtttattctatttataaaattaaaggcccgaaggcctttaataatctaatggtaagagagtacggtatatttcaaacttcggacctttttcataggcatcaaatgtttctgtaaatttattataagcatatgcatctacaaattcgagaatgacttgtgatacagaagtagaaacatctccaccttctttttgagcaatgacaattgtttctaagtaagctttcataaaccagttacctcatgaaaatcaccaaatacatcctcgaatgtattagctttagttttatcttcacgtaaacgaatcgcaatcggaagaaataatttaacgtaatcagtgcggccgtcagattttaaccaaccattgcattcacattctagaatttttccaatataataattttggttttccataatgcgagtacggtcaagttcatgtgattttacaccggctttatcttttaagcctgaaccagcattcactttaatttttccacattctgattcaagaataaatccaccggctttagtagggtctttacggtgaggataaattcctacaatttttaaatcaacatcaattacttctttaaatttatagagattttttgaacgagcattttcccataatccatcgatatttttgagaataataccttcaagaccttggtcaatatattttttataaattaccttagcttcatctaggttatttactacctggttttcaattaaaattactttatcatatcctgatgtcatttgttctagtttagaaaaacgtacatcatattttaaacgaaacgccggaagaccgtatatttctaccaacgggacataatcccagacctgaaacttcatacattgagcttctttttcagaaatggttccttttaaggatttattggcgatgccattagaagtagtacgagattccgctacttcggcgaattctttagctttactaatttcaggataagcatcaaaaagaaaatctaggccttctggttcctttttaacttgctcatggtataccaattcgccatcaattaacacgccttctggatgaatctggcgggcttcagcagtcattttgattaactcttccttaagaagatctaatcctagatattcattaccagctcgtgataaaagacgaacatcatctaattcatcgcctcggacttcagcaaaacaccgagctccatctgcttttaactgcgcaaaggctggaaacttgatattcttactaatgcctttttcatcataagaacttgcgagcatttgaggttgttcaggaattaaacctggccaaactttgtttgcaatagatactgaagcaccgcattcaaggtctcgcatcatcacccgacgcaaaacttcaacatcatcttttttaccgtcagtaatatatccagttaattcctcaattgccgcatttccagtcaatttccgagtagctaacgtgaattcaatgaagtcgagcatatctgtaagagtcaacattccaaaactttgggtagcaataccaggtttaggccatttcttgatataatactgcaacccacgagaataagtcagacgatatactcgtttaagcaattcattatctttattcttttcaagaattgcttgcttctgcttagttgaaccaatagatgctatttcgttcagaattttaagaatcattgttcatcctttagagtttggtttacagctctattataaatcaattcatcattaagctcagtcaaagacctgtggtacgtggttctaactttatttccttgcatccagtgcttgatataaataaaaccttgctctacacattttttaaaaattcgttcgtctttttgagctcggaattctggattgcatctaaaaaattgatttacgtgaccgtaatcacgcgtagtattaccttcattttcataaatagtgtgaacgacaaacattagaatgctccttggaaaatattatcaccacaagtaggtctattatacaaatactctatgccaccaggtttaatatagttccatgtctgaaacggatgtgtctgatatggatgatatagatgattataaggattaaatccaggagttctccaggtagtgttccaacgaaaagaatcatttttaatcatcttttcaattatatcttttatagctttttcactatcaaaactttctttattttcctttggtgaaaaaagcttattttctacatcattccatgtataaactcgctgagcggtttttggaatattgtcacgctctcctcgagccatccaataaacaggaacatttaatatttcacccgcatgatcgcagtggtgagcaagatcgtcaatataacaaattacgttatatttctcttttgcctttttgaataactcttcttttgaagaatcatgaccacacatcattacttccgagaaggcaccaggaaaaagagcattcaaattaaattgacgattcaacagagcgtcaatagaatcacccaatgctgtaacagctacaaaattataatcttcttttaatttgttaattacacacagggcatctttatatggagacaagtaacgaataaaatctgatcgattgtatttttcaattagcttgacaccaagttcttcatcacaattaaagagtttacctggagaaataaatttctcatcttggatcatttttaaaatatgttctaacggaagattatatttctgagcaaaataaggaagacctgattgccagcttaaacatactccatcaatatcagtcaaaatagtaggcttcatagagagtctcttagtaggtttaacacatcaataaattcagcttcggttagtattgtatcatcttttgttagaccactagccatgctgtgcttcaaaacttttcctttcgaggcttgtaatgcatcgcgaaagcccttgttttggaacgctgcttcaaaatatgcatttgtgtataattctttccacgctggagagtatcttgaaaacggaactccaagccagaagagggtcccacggtcctgagctctagcataagctcgtccagcttgttgggcggcaagcccggataacccaaatatacgacgttgctgttcaatatttttcaccttacacccttggaggaatccttcgagacctccaaattgaatgccatccataacgaaaggccattgggcgaaattacttaatgcacatgatggccatttaaaattgcttcttatctctagctcagacattttcaatacttataatttcaacatcagcccaatgaccatagcaaggaagacgaaattcaactggccagttagggtccttttctaatataatagactgaacttgtggctcttcatattcatcggtatacggacctttatacgttactttatatgtgaccttaatgtactgaattccaaaaatcttattaattatattcatactaattcctttaatccgtaaataggagataattcatcgcccatacgaaggtcttcatttccatctacccaggaaacaatataagcctcttttatttgaataccactccatttaaatggaggtagaaccttagaaattaatccaggtataccaactccctttaattcaacagtttgacctaaaaagaatttcattagaacctcatctgaaagccatgcgatttaacattaccgccgccaatatcagaaatattaatttcacgcgcaattgaagggtcaatgtcaatttcacgattgagtttagtgatagctaaagtatcgcgcccatttacagtacggaactctaaaggacatactacattaacgtagtttttaatcgattcactagtaggttgcaaatgagcaggaaggtctttaggcgccttagagaaaactacttcgcagaaatttttacgggtatcaaaataagtagtcataaacatagtattttcctcagtaaggggccgaagcccctcattttattttaaatatcaaattcgttaagaactacatcaaagattgcttcaagatgctcaggtttagctctgttactcagaatatgacgaatccaagttttaaccagaagcttgcgattaacgccattccagcaaggatgagtccctaaatcgcgttgacgaaaatcatcatccaaagcgattttgaagttggaaccttccattgtgattgaaaccgtgatgccattttcaaatcgcatataaacgtagttaggagtcatatactgttcaatttcgcatactgatccattttgatgtttccaaaggcaaatagtatcaatagaacctgcaataccattagaaacatatttacgttcaaagttgatgtagttcatttttattctccgagatgtttaattgcggtacaggtatataatatcatatcctgtaccaaagtaaacaattattttactactttccagtgctgcatgtcaagtttaccaacttttttcatcttctcaattaagcgttcggcacgttggcgagctgtaacataataccattcacccaattcattttgttcaatttttccaacgattaccgtattcaattcataaatccaaccagtaaagaaattatgaacttgaattgtaaaggtgaaatctgttcccataccttctgttgtttctacttcaataatatcaccttcaactgccattaagaaccacatagtttcatcatatttaccattgaagcatttagttttaactgcagcgttcagattaatcgttttcattttattctcctttgtttgtgtaagataatactatcacaaaggaaccatactgtaaacaactttgtgcaatctttggaaaataaaaaaggactcccgaaggagtcctcaacttatgctttctgcttaccaaaacgagaagcatcatcacgaagaaccgcacgtgctcggcgcatgatcttctcaacagtttgattgatacgagagttcgacccacgcttgtagccagcgcgtttagaatcaccaactttcttttcaactgctttctttgctttagcttgttttgccattataaattctcttttaaatgaaaatgcaggacttattggcattgcctgcgaaagccctcaagggggtacttaggttttgaatatttaccgacaggataaccataaacctcgtcaacataattacttcagtgttaccacaaagtgacgaactgcttttcgtgcagcagaagccagaggcttagcatatttaagttcatctttttcctgaagctcagcagctaatgcagtttgagcaggatttagatgtttgaaataacgcaggatttcaagagcttcggcttcaacatcaatagatgcgccatagttttcgtgaccattattccatgcgtttcgttgcagttcaagagcgtgttgtaattgtttaatcatttaaaaattctcgttagagattaaaactcggtagtcacgttcttctgaatttcatcttctttcgacagatctctcagttgtagactaccacatagaattgaaactcaattcatattattatttatatcacttataaagacacggaatagctttatagtgacaggtaacgaatttttgtttaatttcttttggctgcttaagacccagagctacaaaaggatgcggaacatttcgaatttgaccaactggaagagaagtcaaatcaccaacttcgcagaaaccttcaggaacatcaggaccaacagagtgaactacacacagttcaggaacttcaccttgaacacgtttaccgataataagtcctgattctgtaacttcttcatcaccggcttgtgcaggttcagaaactaaaataacatattcaccgacagcacgaattggtagctgttgtacttcagacatcgtttttcctttttgttgacagatgaattaataataacaaataattcttaaagcatttatttaccaataaattggagcaaatgctcaactttcataccattaacggaaatcaatttgtcaatagaaaaacctcgccatgcaccaagctcaacatcaaatactggaatcatatcagtagattctttccgagcagattcagtcaatttaccagtttgcatggttggcataaagtccgcatcacgagtgcctttcatagtacgaatagtaccatcagacttttcaaaaactacgtttgaaatccccatggacaatttagttttcaaaatttcacgaattgctactttctgttcagttgtcagtttcatttatttacctattacagttttaatatgagttgttccacgttctttaagagtggaaagcaatttttggcatttttctaaatcagatttccaactatacggcctatcaatacaaacccattctgacttataatactgcttccatttagagaaaaaatatttcttatactctacagcaaatgaaatgttctcgttagaataagaactaattgctgtgagctgtaccaaacgaaatttcattattcaccacagaattcgttgatattttcccagtttaacttattcaagtttttcttaggaacattaaacacttcaatacctgcatttcgcagaatatcatcccagccaggtttatttttatcgtatgtttcgcaataaaccagctttttaataccagattgagctatcgcttttgcacaatctggacaaggagaaagtgttacatacatagtagcaccttcaattgaagaaccatttcgtgcagcaaacaaaattgcatttagttcagcatgaatttcatttttagacgaccattcggagtgagcgctacggtgttctttcgctaagacaaaacgatcagttgaaccaaatgatacgcattcaggcttatgaccttgaatgatagtatgtttaggcttattcagcaaccaaccttgctcagcagcataatcacagcagttcacaccacctgcaggtgaaccattatatccagtagaaataatacgtccattcttttcaattactgctcctaccttccaggagcaacatttggattcttgtgatactaaatatgcaatttgaagtactgtactcgctttcatttcataatcaccagataagcagatttagcagtttcaacacgataaatttcgtgacgaagtttagttatacttttaataacagaactaattatattctgcccatctttaaagcggtttttcttatcaataaaaattgcaccaaccatctttttgtgaagctcaactggatacttcgtcacaataatagcatcatacacagaaggatgaatactattcactagagtgtcattcattaaagttattctaatgaactgtgctgtgtcagagtcaagcgctctatgatcgccagtatcattttcaagacaattatcaattatatcagttaaattcatcatagtacgccatacaccctttgtgcttcaactaatccatcaaaatccagtttaagatgtgttatttgatcaccatcacctggattcacaattactaatactgaacgaggagtttcggtaataacacgaaccgatgtttcaggaaatcgttcagaaaccttatttaccaattcctgagcaaatagtttaactttttcttggaattctttaacagtaattggtttttcacttagcatgttgatcccagctccttactttcaacgtttttaactaatttgacagaaactaattcggcatcttgggtaatcattaccgggccttctttatactcttcaagatattctagagctttctttttagcttcttccttcgtatcagtttgagcatagatataaaacatgcaaccagtaatacctactactttccacttaatttctttatcagttttaatttcaaatttactgacagaatcatctttttgaacttcttcgaaaaaagaatattctaacatataagcaattgaaaataacgggctaactttataggattcgcccattacatcaacagctttataccaacagtcatcaatttcgcgtttaatgctaataacatttttcgcaggatctatttttactttaaatgaattttccccaataaactgagcaattcgtttattagccccgcaggtttcattaaaaatatctttatacccagctttaaagcgataaaccttatcttcttcaaaccattcgctcatttcaatttcctcatttgttttggtagagctataatatcacaactctaccataaagtaaactattaaattgctttgaattctgatgtctgcgattcaaagcgaatatcgcctttgatgactagctcagcatcaagaccaaatacgacaatgatatgtgctgaacctggatacagcgtaatggcaatagaatccacctggtctggaagcaaagtgttcaatacatgagtcacttgagcatgaattcgaagctcagctgcgttatcaagcttttcaaacatattattagcgataatttggctaaacactacttctacgattttagagtaagttggaaacatatttacctcacataattttcttcaagccaattaataacatccaacgcattatcaaaagttgaaccatctactttgtcttctgtttcataatcaagaacatctaagcctactcttccatcaacaataggccataaacaaaatagatatttcttttctttttcaattttatcacaaagtcgataaatcttttctatgttattcataagttttccatggtaaaggtagtttagttttctttactgttagttcaacatcaggattcttttctcttaatttaaggcattcctcccaagctctgatttcactagtgaatacacaaaattgcccattactagtaccaactaaaccactatttacaataacaatagaccaagtttcatgatgccacgccattaaaagtctcctgaggcaacttgccagcattcaacaccgatacgccgccacatttcaacgacttggttacggtcatcaatagctaatttcacatcaaaatgcggtgcgatgtgtttccagaaaatttcttctttgactacatcatctttacgggtatcaccttgttcgcgttgacattgcataactaatggaacgccagcaatatcctcaacccatttacgggtcatacgataatatttcgttgggtcttcttcggttccactttcacggcctgaaacgactacgatgtaatatccttgcttatcgtacatcttagctagttcaataaccataggattgacaacatcagtatcacatttttcaaggtcataaggaccacgaccattcatttttgctagtgtgccatcaacatcaaaaataactgcttttggtttaccaggagtccctttatataccggaagaccgagatactctcgcatgcttttatacattgagcgtaaaatatcaattggtactgctttagttccacgttttgagttacgtttaactaattctgtccaaggaacatcaaacactttatattcaactttccagccatattctttggcaaaagtttcccatgccaggcgacgttcgggattcaggttagtatctgaaatgattactcccttaacagaatcgccaccgtacagaatacttttagctgtatcaaactgcataccagttacgataccttctttctttttggtatacttatactcgtcacgttcttcatggcccatgatggattgacgataatcatcacgattgatattataaaacccaggatttttagcaataaattcacgagcccaagtgctcttacctgaaccaggacatccaacagtcaaaataatctttttcatcatttaattcctaagaaaacttcaagaatacgaatattatgctcacgccgccctttatataattcagctgttgattgattcaccgatttgctctgaacattagatgaaataaattttatcatgtgatttttaagctgatacatatcaagcccacgggcttttgcttcttttcgtaatgctttaccagcgtcatctaaagctttcgcagggtcttcatcatttaatactaccccacggtccaaatccatatatactgcaccgtggcatgcatcaatgtaacggtctgaacattcaatataacgttctaacagagttttcatttattatttctcaaccaacgattgaatataatcatgcaggtctttagatgctttaccccacttattttggtattcatttttaagattagcacgtgattgagctaataaaacatcattagttggaggtaaagattctaaccgctgaatctggcgtccgtaaatcattgcagccatctcggattcataaatcaatcctttgagatgttcaaattgatgccatgaaatcatttgcatttatcctcttttaactcttggcgataataacatatcatagttttctgatcatgtacatatcgttttacatcattaagccaaatacgaaattcctgggaatcttcgaatggcataccgacccaagctttaccatcaataactttaacttgccaggatagtttagcttcatcgtatgactttatttgtactggccaattaggatgaactgtttctttctttacttctagaggctttgtcgaacaaccaactagaagaccaatagataatattactgctgatagtctaatcatttagaaaggtcctggatgtcttctgcgaacttgttgaaggagttgttgatttgtttttcaaccaatcctggcttatgagccaccacatccgccttctttgcgtctttgcgcagtttttcattttcacgctcaatagcagcaattgcctcacgatttttattattcatcgcatcaatataattatactgaattcgcaaattatttaatgctaaagcgttttcattggccgtttttgtaatttctacaacagacgtttctaatctttcaattttattttttaaaattaaagaagttccgcccaatgcaattacaattaataacaagcctgttgtcgtattacttaattgcataaagttttaataacctctataatatcgtcttgagaaagaccgttaattaaaatatgatgttcagccggagatttagaaattttaaagcatgcctcaacatcttctgccatatccgatgcactacgatttggattactaattccaagacgatgttttcccgttaaaggattaacgatgatatagcatttacagttgttaatatgaacattaggttgagtctgattaatgaacacatcacaatcatatttcgcaagctgattttctaaaaagactttcatctcctcaaccgcatcaggaagcatatcacgggcttgctcaagacgacgatttcgatattctttaatggtcgttttccgcttgacttgcttagctaaatctttcttaagatcggtgatatatccaactcgacgatttcctttaaatacagaaatcccatctgtagtatcaccgtatgcttcaacgaccatctcagtagtaataagctgcaaatccatcataaagtcctcatgttatgtcagtaagactactataacacaacacgagggacttgtaaacagcttagtatccttctgggataaattttttataatttttcaaaaaattctgttcgatttcacacatgaccttctcttgactatcatacccttggtagaggctcatgatgataccgaacagatgttccattccagcacctttagcaacgccttgcgcttccattgcataagtctttctatctttgccgcaatgcttattgtgacagtcaagaactaaaaacagagctcggtctaagtacttcagataagtcgtttcaaatgcttcaatttttctatatgaatattcatcgtcagcgtacattgctttaagatcatctgatgcaccatcaataatagtcttaaacaatttttctggattatctaatgaactttttgtactatgaagagacacgtaccaatcagacttaattttaaaatgagaaccatctttcatcacggcaacataaccttcgatgttttctgcatttttagcttcttctacccatttaggactatcgatttcgtatcgttcaactagatatggacgaagaacagcatctttataaatgtcatcatatgaaatgtattcgcctgtttcattttcacgaatattcaataaaatgattttcatctcttgataagcaagaacgattctattcgtcggagcaacgaattcgaagttagcagtaaatccatcttcagctaattctttaagtctgtcgcgcaacgggtgatgattaatattcatcaaaattccattagccattaaagcctgttcggatttgattgaaccctttgatttgaacagaatttcatcactgtctaaataagttgataccaaagacccatcttcttttgttagaatgtaatccacgtcatttaaatcgatattcatcgtgaatggattttcattcaagttaaaaaacttttccataggacgagaagcgattcttaccggtttttctccatccatttcaaacataattccacgacattctaatgcgtctggaagtaaccaatcagaataagatgcataattatatgagaaaattctgtaagttcttccagatgcacttacatcatctgagtaaaaaaacttacgctgtgagtccttacatagttccattaaattgttaaaaagttcttgcattgtgtatcctcttttgtgttttgaatatagtaccacactccatgtggaagcatcattttttcttatgttgaatattccaaggcgggttaaatagcttaatgaatagtggctcctctaggtcaatcgttgcgattgtcattgtacctaactcatttgtcatagaaagattaaaacattggcgggcgtaaaattcaactttgcttccttcctttagcgcagcatgaattaatgcagatttagtagaatcagacgttttgtctttacgattaatagcagttctataatagtttattcttttacgtaaatttttagtttttccaatataaacaagctcatcatttatagcaatagcataaattacgttatacttgtttggaatagataattgttttatacttccattgtcatctaattctagctcagtatatttaataaatgaatattctgttgcaatttctttcataataaaatgggccttgcggcccactccttaaaagtattttttaaaactcatcataactttatcatcaacatcattatcaatctgtgcaacaaggtaagatgacagttctacttcttgtggcgcggattgaacattatcagaattaagatattcacgaatccaaggatacggatgtttaaccggagcatcagtaattgggcatggaagaccacactgtttcatacgagatacagttaagtaatcaataaagctccacatgctatttgtatttaatccaggaacatcgccatttttaaataaatgaactgcccaatctttttcttggcggttaacttccatgaaaatatcaactgcttcctgttcacactcttgagcaattttaacccattcatcaccatccgtgccaagttgaagttgacgaataatatattgtgtacctttaagatgaagctgctcatcacgtgcaatgaacttcataatcttggcattaccttccatgatttccatgttcttatggaagttaaaggtacatgcgaaagatacataaaaacgaatagcttccaatgcgttgattacgtgcaggcagaggtaaagagatttcattagctcatgcttccaatatgtctcatgctcaatagcatcttcaataacgtcttcgtctgcattaatttctttttggtattcgatatcagctttagcgttttcccaataacgagttttaatcagaacatcatcataatagcgtccaatagattcggctcgtttcatgattgcttcatctaatacaatctcatcaaatacctttgacggatcagtataaagatttcgcataatatgagtatatgaacgactgtgaatagtttcactaaaagtccatgtagcaacccatgtatcaagacttgggtctgaaattaatgacataagtacagcagatggcgcacgaccctgaatgctatccaaaagtgattgatacttcaggttgttagtaaaaatattttgctggtactgaggaagcttattaaactgtgcagcatccatcattaagtttacttcttcaggacgccagaaaaatgataattgcttttcggttaaatcttcaaaaactttatggcgttgaatatcataacgcgcaataccaagacctgaaccaaaaaacataggttcttttaaaacatcaactggatttgtattaaaaactgtagacattaatttttcctctttaaaattctgccgtgtttccaacctggcggtataatatcatctttacctataagcgtgcattcacttccattattaatccatttcttaccgcggattcctttataatctcttggttttattttgtcaaactttgcatcaagttgatatgaccatctaaatccataagcatattgaaatttaccctcggcacaatatttgatatttgacccgtttccattaactgaccgggacgctgccgcaatagagtgaaaggtttctatgaaatccccatctaatgagaatttatgtatttctacagatgggcacgcatatctattcacgttagatacatgctgtttagtttcgtttttatgatgcttgcctagcatccctttaggatgaggattatttttccaatatttcttaaagaactcagaattagctttagcaaataattttctgtgtaagctgtacaatctgttattaattctattgccagctttatctgttgccattaacgttaacgcagaggcaagaccaaaatggccttcatttatcttacatagtaatagatgagctataaaatgttctctggctgttaattcaactaaattttccttatcatcagaacctcccatacatttagggattatatgatgtgtctctttatattctagtaaagattcccgagcctgagctcgggaaattaggtcgttatagattttttgataattcattacaatttacacgctgcgcaatcatcggcttttggagtttctatttcataatcatcagtaccggaaccatcacgagtattatgatagtagaagtttttaatgccataataccatccgtatagcatgtcatcaatcattacagacattggaacctttccttttggaaaaatctgcgggtcatagtatgtattcgctgaagctgattgacaaacccatttcagcataatagctacctgcgtaagataaggtttattacctttcttagctaatttccatgtataatcatagaggtctatgttatgctcaatattgggcacgacttgattaaaggagccctcttttgattctttaacagagactggtccacgtggaggctcgataccgtttgtactgttagaaacttgggaagatgactcacatggcataagtgctgataatgtgctattacggatgccaaagagcttaaggtcttcccgcagcgacgaccagtcacaaacgtattttggagctgcgatttggtcaatctttttattgtaccagtcgataggtagttcgcctctagaccaacgagtgtctgaataatattcgcaaggtcctttttctttggcgagcttaatggatgctttaatgagtccatactgtaatctctcaaatagttcatgtgttaaatcgttagcatcttcataagaagcaaagttacttgccagccaagctgcatagttggtaacacctacaccgaggtttcgacgctttttggctttttctgcttcaggaactggatatccttggtaatccaaaagattatcaagagcacgaacttggacttctgccaattcattaattttatcttggtcttgccaatcgaagttatccaacacaaatgcagaaagagtacacaatccaatttcagcatcaggactattcacatcatttgttggaatagcaatttcacagcacaagttactctgacgaataggtgccttttcacgaataaacggagtatagttattcgtattatcaatgaactgtacataaatccttgctgttcctgaacgttcagtcatgagcaattcaaatagttcacgggctttaatacgctttttacgaatattagggtctttttctgctgcttcgtataattcacggaaacggtcttggtctttaaaataagaataataaagctcgccacccatttcatgcggactgaacaaagtaatgtaatcgttctttccgaatcgttccatcatcaaatcattcagttgaacaccataatccatatgacgaattcggttttcttctacgcctttgttatttttcaaaacgagaagattttcaacttccaaatgccaaataggataataagcagtagcagcgccgccacgaattccaccctgtgagcatgatttaactgcagtctgaaaatgtttccaaaaaggaataacaccggtatggcgtacttcacccatgccaatcttagaaccttcggcacgaatcataccaacgttaataccaattccagcacgtttggagatatattcaacaatcgaagcggaagccttattgatagacttcaatgaatcacctgcctcaataacaacacatgaactaaactgtcgagtcggagtacggcaaccagccataataggagttggcagtgaaatctgtcgggttgataccgcttcataaaaacggataacatgttttaatctatcaacaggttcatcttgatgcaatgccattccaatagccataaatgcaaactgtggagtttcataaatttgaccagtggttttatctttaactagatatttttcttttaattgcatcgccccggaataagtaaattccatatcccgctcgtgcttaatttttgattctaaaaatgtaatttcttctgctgaatattttgacaacagttcagggtcgtatttacctgcatttacacagtaagaaatatggtcaataaatgaacgtggttcatactgcccataaacatgcttacgaagagcgaacattaaacagcgtgcagctacatattgataatcaggttcttcaaccgaaatagaattcgcagcagccttaatgacaatagtctgaatatcatcagttgtcattccatcacggagataagatttaatattttcatataattcataaggatctactgatgttccttcagctgcccaagataaaactttaataattttttgcgggtcaaagctctgagaaacaccactacttttgataacattaattaattgcataagtcctcaacttgaaaatcgtctttaaacaatcggttaactatatgagctattatatcaccatgacacggctttggtttacatgtgcatcctagcctcattccacgtaaaggctctaaatgtgctttagttatttctccagatttaattcgacgtataaaatcttttttgaataattcaatggcagcctcccggctgccagcatctttaccgacgtaatttccccaaaatgtaccgcggtgaatattaacatcaaagtcggatttatatttattcactacccggcatagacggcccacgctggaataattcgtcatattgtttttccgttaatacagtaatatcatagtaacaatcggaagaagttttaactgtggaaattttattatcaaaatactcacgagtcattttatgagtataatattttttaccataaatgataataggctgttctggtcctggaacttctaactcgcttgggttaggaagtgtaaaaagaacaacgccagaagtatctttaaatcgtaaaatcatattgccattttccctttaattgccggatgcgattcataattttcaaggataaaatctttcggtttcatgtattcagttaaccagtaaagctgtgtttcggtgtcacaatttccaaactctataggccaatcaattttaagttcacatagttctttaggctcacgacgtaaaatttctttacattgctcagtatgattcatatagatgtgagtattaccaccagaaaatatcaaatctcctgggataagattacacatcttagccacaatatgtgtcaaggcagcgtacgaggcaatgttgaatggcaagcccaagaaaacatctacacttctttggtaccattgtaaatcaagataaccattacgcacattaaactgatagaacatatgacagggcggtaatgccatttgattgatttcagctggattccatgctgaaacgatttgacgtcgatcagttggtaattttttaatacgatcaatagtttcaactaattgatccacaccaccgaaatcacgccattgtttaccgtatataggaccaagttcaccactatgatatcctaggtctttagcctggttttcatagttatcgtcccaaatagttttaccttgaataagactaccgtgagtaagaagacgtaaatcattaacattggtagaaccggaaataaaccatagaagctcagcaatgcatgcattccaggcgagcttcttagttgttactgcaggaaaacctttagttaaatcccatcgtaatttagtaccgaacaaagcaattgttcctgtgcccgttcggtcatcggtttcatagccattttcaaaaatgtctttaattaaatcttggtattgtttcatttagtaccttatataaattataatacattttatgaagctgaataatcaatacggtttagcatcaaattttctctcaatttcaggtgtgaaatataattctttaccgcgtttggaaaagcgaccaataatatgataattattctcatcaaacgtgatattactaatatccatagctttcaaccaaatatcgatatttctatccagctttatgtcaaaattccaatacggagaactattaccgaaaatactacaagcggattcagtgaaacagctactataaatcttgtctttaggaactactaattgatagacacctttaataaactgaggaccctgccattttggttgtttcgtgtctttttctaatagaatagggtaataattaaaattcatatttccgccacgcgttatttcatttatatactgattccgtaagggttgttacctcatctattttataccaatgagtttcaaccatttcacgcttgcttatatcatcaagaaaactttcatctaattgaaccgttgaattaacacgatgtcttttaacgatgcgagaaacaactacttcatccgcataaggtaacgcagcatataacagagcaggcccgccaattacacttactttggaattctggtcaagcatagtctcaaatggtgcattagggcttgacacttgaatttcgccgccagaaatgtaagttatatattgctcccaagtaatatagaaatgtgctaaatcgccgtctttagttacaggataatcacgcgcaaggtcacacactacaatatggctacgaccaggaagtaatgtagataatgactggaacgttttagcacccataatcataattgtaccttcggtacgagctttaaaattctggaggtcctttttaactcgtccccatggtaagccatcacctaaaccgaatgctaattcattaaagccttcgaccgttttagttggagaataagcgaataccaatttaatcattacgcaaaacccctttcaagaaaccattcagtggctttattagcatcaaagaataattcttcatatgtcttttctttgttttcaaaaactgtcacacaaacacgttgacattctccacagtattcttctgacatactcaaagcgtcagaaaacatttcattaaattcacttaaatcaggattatgcaatgcgttaaaaattgcataatcgaattcatcattcataaattcaaatacaaaaatcatattatctcctattaaaaaggatcaggaacatatccgctagctttaatcattttaattaacgttaacattcctttgttaactgcttgtgagatttcatcaaaaacttcatcactaaaaagttctaacacacccttctgaacttttaatttacagccaacaatttcttcatcgcctatagtaaattcattaccaccaattccaccgaaaaacttaattacaccagttaactgtcttccacgagaatatgggtcgtgtgataaagtaatatgagtcaccccgggtacagttttaaattggcagcgaatatttacttgtgaaattccagttacatgaatgtcagacataatatttttctcaaacagactttttcacaattttccaatcagctttaaactgatcgacgtcagaatggtaaatccagaatcctgcgctttctccatcttcataaagaggacatccatcgcattcatcttcccatcccatatcacgtaaaagatgttcagctttttcaacaagttcagaatctttaccgatgatattaaaataccatttacccctaacttctgaatctttaatgctctgacgttgtaatctcattttattctccttagttgatagggtaatagtatcacactactaccctgatgtaaactactttttgaaagtttttcgcaaaagttcaataatttcatctacattgttttcgtcaacaatgcagtgaattttcgttacgccggaaaccttgtcttcgacttcatcttcttcagaagtcggttctttatactcacgaaaacaatgaaattcgtcttcacaaacgttaaagtaaaaatgctttccatttgcgcattcaatgtgttttattactctaaatccatcagcagagaaagcttctttaacttcaaaccatcctccattttcttgaataattttaactattgctgaattagaacgtgggcgataattaataaatgtatcaataagtcttggaacaagttcatactttttaccgatatacattttcttttcctcattttaataggggcttgatagccccttgataattactgttcaataaatcctgtgtaaaattctacatcttcagcatccataccgtcgcagtattcattaaccataaactgtttaagacggtctaaaggaccttcaataacaactgaaacattacaattaggatcatctaatgcgcttatgatactaagttcaggataacgattacgaataatttcttcaatatattcaaaatcaacaacatcaatatcaattttagccatattattttcctctttaattatcagcagtattgccgatagttgtatagtaccacagtatgctttggttgtaaaccgttttgtgaaaaaatttttgaaataaaaaaaaaaggggacctctagggtccccaattaattagtaatataatctattaaaggtcattcaaaaggtcatctaggtccgtgtcatcagcactagatgaactgccagagcttgagctcataaaatcatcttcagtttttgtattgaagtcatcaacattgaatgcatccaaatcatcagcaactttatcagctttcttagcagcagttgcagcggcaccgcccatcacagcagttcccatgacttgaccgaatttagtgctcagttcttcaaacgatttgaatttatctttagaagtcatttcagaaaggtcaaccatttgttcgaacagttctttctggaaagattcatcgtcaatgtttggaatcgcagattgattcaggaatttagattcgtcgtagttactaaatccagaaacctgtttaactttcagtacaaagttagcaccttcccacggacaagttacatcaaccggagtttcacccatttcaacatcaaccgcaatcatcgcgttgattttatcccagattttcttaccgaaacgatatttaaatactttaccttcattttctggagcagctgggtcttttacaacaagaatattagcccagtaagaagttttacgtttaacaagactgtactctttattgtcagtgttgtacagatcatttttactgatgtactgacatactgggcaagaatcgtaatcaccatgggtagatgaacatgtttcaatataccatttaccatttttcttgaaaccgtgatttacaagaattgcgaatggtgcttgttcatcatttttagacggaagaaaacgaattactgcttgaccgttacccgcattatcgagtttcagtttccactcgcctttatcttcagaagaaaaacctttattgccattcagtttagccatttgtgcagcaagttcagcagtagatttacgtttaaacattttatttcctttttaatttaatttaattaacagttggtgctatgacactttacctcatagctggcataattcgcaatactctgggtcttcgagaggtatccaacctgagttgaaatactttaccatcgatttagcagttgtatcagttatatttatattacctttaactcttcgccatccaggagttttaccgtacagattagaggataataataacacataattctcgtaagcaatatgagataatttccaagactctatattagctcgtgatgttttccaaggtctaaaatcgtcacggttcatataattagccaatctcatatgctctctaacttccgggtctttggctggatgagtttcaccactcacaccaaatccaccaccagcatataccagattaaaatagtctggattatctctggcatttacttcaagttggtattttcgttctgcttcaataacatccaagtcatcatcaatttgaattattttaacgctcggtttttgaagcattagcgcattcaaaaatcttttttgtttacatgagctccagtattcctttccggaagagtcatatattattccgttctcaaatgagcaatttaatttactaccgatatagtaatatggcggagtcttatttttgacacggtcttcaaatgtaaaccaatatactatattcatatcaatacttgcaagatttcacagtttcaatgaaaacatttttagctttctgtgaatcaatatttaaaatttttctataagcctttaactttatagaataattattccagaccaaattatcagtctgttcatcatgtttatcaattatatttaaaaacgaatcaagcaagataaacgtctcaaacgaaattatattcgattgaagtagtttaaaaatatagcttgattgaacctttggattatactcaaagatttctttaaaagcagaaacttcaacttttttactaaaataataaatgttgcgaatatcttcttcaaacttaaatttaatttgctttaagcgtccgatatattcacgataaaacacaagtgcatcagcgtcagagatgtcaccaatccaagcatcttggttagcaacaagattgcttataaagattaaagcaagttcctttaatttatatttttctgataacttctggaaaaaatacttatcccttcgcttttgataagcggcatcagacacccgcatgcaccaattatacttaattacatcatactttccattcatatgttgttttatcattaagtataatttataaactgatttaccatcaatgtatctttcaccaccagcaggcatgcggagtttaatcatagtagaaaatctaatgtattagttttttcacaacgaacaacagaaggacgtaaaagattttcgtcgatagcttctgactgaattttttcaattatacccgaaggaataaatttagcaaattgagtttcaggaatagaattttcttctaagaatgctgttgtagcttcaagataactcattccaaactcttctaccattttttcgataataaatccattttcttgacggtcaagaagctttgcaatttcatccttttctttcttaattgaaagttctttttctgaaagaccggtctcatcgaccggacgaatatcatttagagaaaactgtgtcataaagttcaactacctcttcagtttcagcttcaaacacatcacggttatctttatgatacaaagctaacagacgattaaacatcttaccatcaacgccaagttcatctttggcacgaattcgaatatctttaatcaattcattataaccagaaattttcagtttatgatcagatgcttctttaataaatttagccaagtcttcgccatggatagcttcatcaaattcaaccatttcttttttagccattattcacctcaaaattcattaatgctattagttaatttagaaagacccgcttttacaaaatatgaataaattttgccacgcggtggtaatttatatgaattatagtaattcacaatgtttgaagcaatattatcaggaatataatcaaaatcaattagaactaaattttctttataacgattatattcagattcagtgagaagcaccttagcttgctcgcggtcattagcaatagcttcaacaatagaggttttcattgaaggagttcgttcaccttcaactctagtaaaccaaaagtcagaccgtactttaactgaagcaacgttatcctttttgtcacctttaaggattttagtcatacagtcaatttcagcagaaccgcttttaattttaacccatttcttgtgcatcggtgaccattgcttaacatttgggtatttgtgaagttgagtaaagtcaccatccgatgaaatgattaaaatcttatgtccttctaaagagaactttttaacaagaacagcaatatggtcatctgcttcatacttatcaatatccataacgatgtatggcatataagctttcaattcatctataactttatgactggattcaaaataaccttcccagtcccaagtagattcttctcgtgcttttccacggtttttcttataataataagcgaaatcacgacgccagtatccagatttcgcgttatcaatgcacagtacaattttagtgtatccaagagcttttgcttttttgacattaaacttaattgagttcaatatcaaatgacgaaccattgataaattaattttttctttatctgggaagtttaccaaagcagttgaaagcgcaatttgactaaagtcaattaagcagattccttctttgtaatcttcatccagcatcatttctaaatccatatgaacctcgttcaattagtgagatttctattatataccatccgaatcttaaagtaaacaagtataaatacttattattgaaaacacaataggagcccgggagaatggccgagattaaaagaaagttcagagcagaagatggtctggacgcaggtggcgataaaataatcaacgtagctttagctgatcgtgccgtaggaactgacggtgttaacgttgattacctaattcaagaaaacacagttcaacaatacgatccaactcgtggatatttaaaagattttgtaatcatttatgataaccgcttttgggctgctataaatgatattccaaaaccggcaggagcttttaatagtggacgctggagagcattacgtacagatgctaactggattacagtctcatctggttcatatcaattaaaatctggtgaagctatttcggttaacactgcagctggtaatgatattacatttactttaccatctaccccaattgacggtgatactatcgttctccaagatattggaggaaaacctggagttaaccaagttttaattgtagctccagtgcaaagtattgtaaacttcagaggcgagcaagtacgttcagtactaatgactcatccaaagtcacagttagttttaatttttagtaatcgtctgtggcaaatgtatgtagctgattatagtagagaagctgtagttgtaacaccagcgaatacttatcaagcgcaatctaatgattttatcgtacgtagatttacttctgctgcaccgataaatattaaacttccgagatttgctaatcacggcgatattattaatttcgtcgatttggataaattaaatccactttatcatacaattgttactacatatgatgaaacgacatcagtacaagaagatggaactcattccattgaaggccgtacatcgattgacggtttcttgatgtatgatgataatgagaaattatggagattatttgacggggacagtaaagcacgtttacgtatcataacaactaattcaaacattcgtccaaatgaagaagttatggtatttggtgcgaataatggaacaactcaaacgattgagcttcagcttccaactaatatttctgttggtgatactgttaaaatttccatgaattacatgagaaaaggacaaacagttaaaatcaaagctgccggtgaagataaaattgcttcttcagttcaattgctgcaattcccaaaacgttcagagtatccacctgaagctgaatgggtgactgttcaagaattagtttttaacggtgaaactaattatgttccagttttacaacttgcttatatagaagattctgatggaaaatactgggttgtacagcaaaacgttccaactgtagaaagagttgattctttaaacgattctactagagcaagattaggcgtgattgctttagctacacaagcgcaagctaatgtcgatttagaaaattctccacaaaaagaattagcaattactccagaaacgttagctaatcgtactgctactgaaactcgcagaggtattgcaagaatagcaactactgctcaagtaaatcagaacaccacattctcttttgctgatgatattatcattactcctaaaaagctgaatgaaagaactgctacagaaactcgcagaggtgtcgcagaaattgctacgcagcaagaaactaatacaggaaccgatgatactacaatcatcactcctaaaaagcttcaagctcgtcaaggttctgaatcattatctggtattgtaacttttgtatctactgcaggtgctactccagcttctagccgtgaattaaatggtacgaatgtttataataaaaacactaataatttagttgtttcgcctaaagcactggatcagtataaagctactccaacacaacaaggtgcagtaattttagcagttgaaagtgaagtaattgctggacagagtcaagaaggatgggcaaatgcggttgtaacgccagaaacgttacataaaaagacatcaactgatggaagaattggtttaattgaaattgctacgcaaagtgaagttaatacaggaactgattatactcgtgcagtcactcctaaaactttaaatgaccgtaaagcaactgaaagtttaagtggtatagctgaaattgctacacaagttgaattcgacgcaggcgtcgacgatactcgtatctctacaccattaaaaattaaaactagatttaatagtactgatcgtacttctgttgttgctctatctggattagttgaatcaggaactctctgggaccattatacccttaatattcttgaagcaaatgagacacagcgtggtacgcttcgtgtagctacacaggttgaagctgctgcaggaacattagataatgttttaataactcctaaaaagcttttaggtactaaatctactgaagcacaggaaggtgttattaaagttgcaactcagtctgaaactgtgactggaacgtcagcaaatactgctgtatctccaaaaaatttaaaatggattgtgcagagcgaacctacttgggcagctactactgcgataagaggctttgttaaaacttcatctggttcaattacattcgttggtaacgatacagttggttcaacgcaggacttagagttatatgagaaaaatagctatgcagtatcaccatatgaattaaaccgtgtattagcaaattatttgccgttaaaagcaaaagccgctgacacaaatttattagatggtctagattcatctcaattcattcgtagggatattgcacagacggttaatggttcactaaccttaacccaacaaacgaatctgagtgcccctcttgtatcatctagtactgctacgtttggcggatcagtttcggcaaacagcacattaactatttcgaatactggaacggcaactcgtctgatttttgagaaaggacctcaaactggaactaacccagtacagacgatgactatccgagtttggggaaatcagtttggcggcggttcagatacaacacgttctactgtatttgaagttggtgatgaaacgtctaatcacttttattctcaacgcaataaagctgggaatataacgtttagtatcaatggtactgtaatgccaataaatgttaatgcttcgggttctttgaatgcgaacggcgttgcaacatttggtagttcagttacagccaatggcgaattcatcagcaagtctgcaaatgctttcagagcaataaatggcgactatggattctttattcgcaatgatgctgctaacacctattttatgcttactgcatcgggtgatcagactggtggatttaatggattacgtcctttagctattaataatgcatctggtcaagtaacaattggtgaaagcttaatcattgccaaaggtgctactataaattcaggtggtttaactgttaactcgagaattcgttctcagggcactaaaacatctgacttatatacccgtgcgccaacatctgatactgtaggattctggtcaatcgatattaatgattcagccacttataaccagttcccaggttattttaaaatggttgaaaaaactaatgaagtgactggacttccgtacttagaacgtggtgaagaagttaaatctcctggtacattgactcaatttggtaacacacttgattcgctttaccaagattggattacttatccaacgactccagaagcacgtaccactcgctggacacgcacatggcagaaaaccaaaaactcctggtcaagttttgttcaggtatttgacggaggtaaccctcctcaaccatctgatattggtgctttaccatctgataatgctacaatggggaatcttactattcgtgatttcttacgaattggtaatgttcgcattattcctgacccagtgaataaaacggttaaatttgaatgggttgaataagaggtattatggaaaaatttatggcagagtttggacaaggatatgtccaaacgccatttttatcggaaagtaattcagtaagatacaaaataagtatagcgggttcttgcccgctttctacagcaggaccatacgttaaatttcaggataatcctgttggaagtcaaacatttagcgcaggacttcatctaagagtttttgacccttccaccggagcattagttgatagtaagtcatatgctttttctacttcaaatgatactacatcggctgcttttgttagtttcatgaattctttgacgaataatagacttgttgctatattaactagcggaaaggttaattttcctcctgaagtagtatcttggctaagaaccgcaggaacgtctgcttttccatctgattctatattgtcaagatttgacgtatcatatgctgctttttacacttcttctaaaagagctattgcattagagcatgttaaactgagcaacagaaaaagcacagatgattatcaaactattttagatgttgtatttgacagtttagaagacgttggagctaccggctttccaagaagaacatatgaaagcgttgagcaatttatgtcggcagttggtggaactaataacgaaattgcgcgtttgccaacttcagctgctataagtaaactctctgattataatttaattcctggcgatgttctttatcttaaagctcagttatatgctgatgccgatttacttgcgcttggaactacaaatatatctatccgtttttataatgcatcaaatggatatatttcttcgacacaagctgagtttaccggacaagctgggtcttgggaattaaaggaagattatgtagttgttccagaaaacgctgtcggatttacgatatacgcacaaagaacagcacaagctggtcaaggcggcatgagaaatttaagcttttctgaagtgtcaagaaatggaggtatttcgaaacctgctgaatttggcgtcaacggtattcgagttaattatgtctgtgaatctgcttcacctccagatataatggtacttcctacacaagcatcgtctaaaactggtaaagtgtttgggcaagaatttagagaagtataaattgagggagccttcgggttccctttttctttataaatactattaaaataaaggggcatacaatggctgatttaaaagtaggttcaacaactggaggctctgtcatttggcatcaaggaaattttccattgaatccagccggtgacgatgtactctataaatcatttaaaatatattcagaatataataaaccacaagctgctgataacgatttcgtttctaaagctaatggtggtacttacgccgcgaccgttcgatttaatggaggagtacatgttcctactataggtagtagtcaacagtgcggtgtttatccaggtaacggtgatgcagctacttttgctatggcaaatattgacatcgtttcgtggaatggtattggttttaaatcatcacaaggttcagcagaccgaactgttgttattaacgctcgtaccggtgatatcagcactaagggcggtttttatgcaactggtcctgtccgttctaacgctactgctcctatagcagcaaatgatcttactagaaaggactatgttgatggagcaataaatactgttacagcaaatgcgaactctagagtgttgcgttctggcgatactatgacaggtaatttaacagcgccaaactttttctcacagaatcccgcatctcaaccttcacatgttccacgatttgaccaaatcgtaattaaggattctgttcaagatttcggctattattaagaggacttatggctactttaaaacaaatacaatttaaaagaagcaaaaccgcaggtgcacgtcctgctgcttcagtattagccgaaggtgaattggctataaacttaaaagatagaacaatttttactaaagatgattcaggaaatatcattgatctaggtattgctaaaggaggtcaaattgatggaaatgtaactattgatggaactttacgcgtcaatggaccaataaacaactttggaaatttttctacaagtggtactattacggcaagtaatattgtttctgctacagtattcagatcaacatccggttcattttatacaagagcaataaatgatactgcaaatgcccatctttggtttgaaaatacaaatggctcagaacgtggcgttttatattcaaaaccgcagtctgaaaatgaaggcgtaattacaatgcgtgttcgtcaaggaaccgctgcgggagctcaaaattcagaatttcatttcatttctactgatggtggtatcttccaggcacgcaaattaactgctttaacttctattagtacaccaactattagtgttaatttaattaatcatgattctaaagcctttggacaatacgattcacaatcattagttcagtatgtttatcctggaaccggtgaaacaaatggtgtaaactatcttcgtaaagttcgagctaaatcaggtggcactatgtggcatgagctttgtactgctcagactggccaggctgatgaaatgtcttggtggacaggtaatactccatcatctaaacaatatggcattcgtaatgacggacgaatggcaggccgtaatagccttgcattaggtacattcactacaaatttcccgtctagtgattatggcaacgtcggtgtaatgggcgataaatatcttgttctcggtgacactgtaactggcttgtcatacaaaaaaactggtgtatttgatctagttggcggtggatattctgttgcttctattactcctgacagtttccgtagtactcgtaaaggtatatttggtcgttccgaggaccaaggcaccacatggattatgcctggcactaatgccgctttcttgtctgttcaaacgcaagctgataataacaatgctggagacggccagacgcatattgggtacaatgctggcggtaaaatgagtcattatttccgcggtaaaggcaaaactaatattaatactcaggaaggtgtagacgttaacccaggtatattgaagttaaccaccggcggtgaaagtattagctttaatgccgcaactggaagtattaattctacattagcttttcgtcttaataaaggcataattattgatggacctgataatcagggattccagtttaacgccccgacggctgcagatggtactagaagtatatactggaacagtggtactcgcgcaggtcaaaacaaaagccctgttacagttaaagcatggggaaattcatttaacgcatctggtgatcgtaatcgtgaaacagtctttgaagtatcagatgggcaaggttaccatttttattctcaacgcgtagctcctgcacctggttcgactgtcgggcctattcaactccgagttaatggtggtttattaacttctggtggtattactgcttccggttctattgttactgaatcaagtttagttgctaataacggaatgtctataaacggccaagccaaatttggcggaactgctgatgcattaagaatttggaatgctgaatacggtgctattttccgtcgttcggaaactaacttttatattatcccaactcctaaagatgctggcgaaagtggtggaataagtaatttacgcccatttaccatcaatctcgcaaatggcagtgttatgatgggcaatcatacacaagctggaaaaaatttgcttactattgataacgtatcaaaatttgttcaaaccgatgttagacttcgtgttaacatggattccgacggtattgttttgaatgcttcttctcaagcagcgtctaactttatccaaggacgtaaagcggatgttacaaaatggtatttaggtattggcgatggcggaaacgtcgttcgtatgcataactacacctattcacatggtattgcattaaactctgatactgtcgatattactaagcctcttaaaattaataatattcgaattggtacagatggcaacatcacaggcggtactggtaattttgccaacttaaatacaacgttaaacaataaagtcgatgttggtggttggtcaggcggagccacaactggatggtataagtttgcgacagttaatattcctcaatctactggaacagtagcatttaaaatatatggcggttcaggatttaattttaaaagttatgggcaagcttctgtcgcagaaataattcttagaactggaaataataatcctaaaggacttaacgctacattatggaacagaacttctgaagcattttcacaaattgccacagttaacacgagcaatgatacatatgacgtttatgtttatgtgggaggatattcaaatgctttagtcatcgaatattcatgcaccagtaatagtacagtaaccgtagtcggtcttaacggaggaattcaacctattgttgaaacacttccagaaggtcatgtagtaggtaaaactgtaagattattgaataacatcgatggaatgtttgctgctggcgaatctgatgttgttactcgtggtgaatttgttaccaataaccaaaaaggtttacgtattaaatccagaggtaatgatattgattcgaatgctgctatcattcgaaatgatggtggaagtttttatattttagctacagacaagaatacgtcagaaaaacccaatgcggctagtggtgattggaataatttaagacctttctccattaatatggctgatggtcgcgttggtatgaaccatggtctaaatattaccggcggtggcttgaatgttactggtggcttgaatgttactagtggtaatactagtttaggtaatatctcgtctcgtgtagtagcaggttggcgaggagcgtctggttgggctgataactcggatacaatgaaatctaaaatcacctttatggcagaccatggggatttatctaattcaggcagttattatcctattgtaggtgcatacagtaactacggctcggcgggttatcgccaaacctttgaatttggatgggtcggctctggtaccaccgctggatggcgtgatggtattattcgtatacgtggcgacaatgctaatggccagcaagcaagatggcgctttacaatggacggtactctagactgccctggtaaagtactgctaccacaaacaggtgcctttggtgtcaatacatcaaatggtctaggtggaaatagtataacatttggtgatagcgatactggtattaagcaaaatggcgatggattattagacatatatgcgaacagcgtacaggtattccgtttccaaaacggtgatttgtactcatacaaaaatataaatgctccaaacgtttatattcgttctgatattcgtttaaaatccaacttcaaacctatcgaaaatgcacttgataaagttgaaaaacttaacggtgtcatttacgataaagctgaatatataggcggtgagcctgttcaaactgaagcgggtattatagctcaaacgttacaagacgttttaccagaagctgtccgtgaatcagaagacagcaagggtaataaaatactcactgtttcttctcaagcccagattgctcttctggttgaagctgtgaaaacactttcttctcgtgtaaaagaacttgaatctaaacttatgtaaaagagggcttcggccctctaaggatttttaatggcaattgtaggtgttcctggctggattggcgaatctgccgtgaatgaaactggacaacgttgtgttgatgccgcttcagcagttcgtgtttcagttcctggttggatgagctcaatggcaggaaagtcagttgaaaaagcttattcaattggctcaaatcattcatataataaagatactttaattaattggcttaaatcaattggaacagctcctgctgttgtaacaataacaggagatattgtttctagttcttcgactattccatgtttagattttcctagttcattaactaatgaatatgtgacattgattattaactctggcgttactgtttatggccgaggaggtaatggatctggatctagtggaggttctggagatgctttagttcgagcaactgctggcggtacggctattaataatggtattggtacacgcttacgtattacgaataatggcgcaatcgctggaggtggcggtggtggcggtggttggtccatagactataacttcacattagctaacgttgctggcggaggcggcggtcgtccattcggtattggtggtcgaggtggccgtggtaatggtggtaatgcaacgttaactgctgcaggtggtaaagtaactgttgatggtaataacatgagtggtgcgggtggtaatgttggctcagctggtggcgctgctgttcgtacatcaaactttcaaactagtggcgctggcgctgcgggtaaagctgttactggtaatgctccaacttggactaaagttggtacaatatacggttcaagagtataatttgaataaatatccttaaaaggagggtctatggcagcacctagaatatcattttcgccctctgatattctgtttggtgttctagatcgcttgttcaaagataacgctactgggaaggttcttgcttcccgggtagctgtcgtaattcttttatttatgatggcgattgtttggtataggggagatagtttctttgagtactataagcaatcaaagtatgaaacatacagtgaaattattgaaaaggaaagaaatgcacgctttgaatctgtcgccctggaacaactccagatagttcacatatcatctgaggcagactttagtgcggtgtattctttccgccctaaaaacttaaactattttgttgatattatagcatacgaaggaagattaccttcaacaataaccgaaaaatcacttggaggatatcctgttgataaaactatggatgaatatacagtccatttaaatggacgtcattattattccaattcaaaatttgcttttttaccaactaaaaagcctactcccgaaataaattacatgtatagttgtccatattttaatttggataatatctatgctggaacaataaccatgtactggtatagaaatgatcatataagtaatgaccgccttgaatcaatatgttctcaggcggccagaatattaggaagggctaaataattatttgtttgtatacatctctagatatcgatatacaccctcaaaaccctcgttgaattcgtcgatgagggttttcttatcttcttgagttaattcagaaacaattttacggaatgaattctgatttaactttctaccttcatgcgttactccaatctcattcagaaatgcaataaaattagcacgattctcaacaatatcttctctggaaaatttaatcaaaatagacgcaacagtaataatttcacgaactgtatcaatgtttttattcattaactataccactcaattagttgactttactataatatcatcagacgcttgatttgtaaactggtctgtggtattttcttcaaaaattttttctacgaattccttgaacgacttacgttcctgagctacattgtgctcgattaccttttcaagattatgactcattcgaaataatcttcaatttcgtaatcatggacgtaaatcattatagtttttaatacatcatcaatactttttcctggagctggaattacgtaaaaacgccccgcctttgagttatctttataagttccaaccaagaaatcattattctcgagatgtagttcttcaactaattcattaacaattgaatggtataaatttggtagaaacttatatagcttttctagaatatcaattttgattgtgtattgaaccacggactgagaatcaataatcatagaccttccccttatgtttctgtttgcgattagattctttaaacgctttcttcttatccttatgaacagaagctttattaaaattatgttttgcgactaaattgttcatagtgctgaattacctctctcaaacatttgcatgtgaatgaaaactttttagctacaccacattcaaatatatgttctcttaaatcacgtgtatcggtatatcccatctcaacgataaaatgccgtattagatttttatctttatcattgagagaattaaaataatcggattttgaattaatttccctggccaaattgaatcaccttcagttgacgttttaactcttttatcatttcttcgttcatcgcaatataaagatcgcgtaaagcaggttttagcattccatttactggagaactaaatgggcatacataatcttttcctacaagctttttggcgaattccatatcgcagaacttaaatcccggctcattggtataaattccccaattagttgacatcattttattggcatattctagtgcctggatttgattcataattccatcaatttgaaactttttaatattcattagtaaaggtcctcagagtaaagttctttttcattaccaccgcgttcaatacgtacttgtccagcgtaagttgcaataatcattgcttcttcacgtgtccaataattactatattggtcaataaacccttggtcatcatcacaaacttgttgagtaactaattgaggtttaactacatctaaaacttctgccatatctttagaataatgacgagcacctggaataataagagttcgtccatcttttaatttaaaacggttggctgcacagacaattcgtcgttgatacttttggttttcatcccaatacgcagtctgccaacagatttcaggaacttcatctaaaacattttgttctgtatattcaccaccgtaagaagctaatttagcagccagactttccggagtctcacgcgacaaagctttatctaacagagctaagcgttctttaaaagttttcatttaaaccatcctttaatacgttgccacaaagttttctgctgagctttgttaacaccaattgagcgaataaccggttgagattcctggaattctttataatcatcaaggtaaatttcgtaagctgcatctgtaaatgaacttattgctgccataaaattattgcgaatacctactggagcatctttactttcacgaataatcatgtatttaccagtcttaatctttacgatagttccaagataagctccatggtaccagatgtcccaaccctcttgagtaggttctgcgcaacgacgaagttcattaacaatttctaacttgttcattatttattcctcacagttcagatgctacggtgattactgcttcaatgttttctgccgagcgtttaatgtcaagatacacattaccgtttttagcgattttacatgacattccgatgtcagtaaatttctgaatatgatgttccatcattttgtatccaaaaattcgcatgtttccattgttgttaatttcaaaattacgaattccgtgagtgcgtttttctaaaatggcaagataattactacgataagtttcaacctttttaagaacaaatccattttcatctaaaagttttaacatgaagtctttatcttcttccatatcagaagtaatctcacgagctttacgagttgctcgttttttcaacagttcaggagcattttcctgtgcgtataaagttgctgcatttgaaataatatcctgagcttcgcctgtaatgattaatccatcaccagatttctccaccaggccttttttaatcaataccccaatattactattaactactgcgttacctaaatctggatgcacctcacgaacttctgcagctgtaatgaaatctttcttagctatggtaattaaaattgcagcagtcttttcattcagaacatcgttagaagctttgatgatgtaagttactttagacattttctaatctccgtaattctgtatcagtagttgatagttgtatagtaccacagtatgctttggttgtaaaccgttttgtgaaaaaatttttgaaataaaaaagggagagccaaggctctccctaaaattactgcatgactgtgataactgtcatgataacacgttgaattccgaacgcaagaagacctcctgctacggctggaacaacacctaaacccgctagtaaaatgctaccagatactaatgccgcgcttgtaatacctatgaatggactcatttgatttcctctaaatctttggtgtattctgtaactacatcagtagttttccaatattcgttttcttcttttttagctttagcttcttcagcaagtttctttgcttcgtcggaagtcatatgaaaaatattcattccaactagtttatcaacataagaagaatacatatcgattttcgaaagttcttcggtcagttctttacgagttttaccctgtacaacgatttcacctgaaattactttcttaatgaaatgtgccttggcaaaggctaaacgaaaagctgactcagtttctttgattttgttatcaattcgtttttggacataagttttacgaacttcaacaaagtctttaattaaatcgactacgttatcgtaaacttgtagctttcctttctcattaataacggtaatattttgggaacgacgctcaattaacccaaagtctttcataattttcgcgtgacgttcttcttcgttatcgctcaaagcgtattctttacggaatttaactttaaagccaaagccatgctcaccacaagcatcatcccacgtaatgaagcctttatcttcaagcgggtctaagattttactcacataagtttcacgatcatacttatatggaatctcagtgatattcatttgagttcgtgaagtaaacttgtacgttccacgaatttcatattgaccgtcaatttcaacgacttcaccgcgaaattctgggaattctaccttcggtttagttactttctttccttgaagagcttgcaatacagctttcttgacagaagaaacactatgaggaagaatgtaagttgcataaccagttgcaataccggaaacaccattaagaagaacagtaggaataataggcaaatagaaagcaggcggaatgtgttctttatcttgatgtaccggagcatattcagtatctttatatacgttatagaaatttttacttacacgagcaaaaatataacgacttgccgctgctttttgaacggtacgagaaccaaagtttccttgaccgtctaacaaaggaaagttattattccaagtgttagccatcaaagcacctgcgtcttgtgcagagttttcaccatgatgatatccaaggtctgctacaccacctgcgatagaagcgagtttgtgaaacttatctttatttcctcgtgccaaatcaagagctcgagcaataacaaatcgttgaactggcttaaatccatcaatcatatttgggatagcacgattttcaaccgtgtacatagcataagccaatgcttcattatcaatgatactttttaaatcgcgattattcagttgcataaatttaccatactagtgaatgtagtgccataataacatcagaaatgaaaagcacgacttgaattaatccgaacattattccgtaatataatgctatcaataaaatagcaagggctaatgaatagcccaagattttcttaatcattagtagataacaacacaaatgttaaatatgcacacataccctgagctaaagcttgtgaaaacacactgctagcatcgatacagatagttaaaacacatgctactatccaacaaataaatgaaataactcctaataattttgcgatattcatattttcctcactggcgtccgaagacgcctttagttttaagattattacgatagaactgcatcacatgttcgttatggaaattactcatacacaccacacattttgcataaacgttcaaaacagataaatccgccacctacgcacatcacgacagccacattatcattaagaggtagacctaaagccgtaaagattccagtcaatgtgaataaggctaaaactaataggtaacccattacaaatagagctttcattagtatgcctgcaaaacaaatttaaagttatcagccaacatacggttcatttcttcaagcgtttgatactcagaatgatgattacgagtaaacgccaaagctaactgaccttttccaaatcctgtcgtcaaaggtttcatcttagaagcaggaagataaaatactgtgtatggaacattgttatttgcaatagtacgcgcaagctgagaccgacgctgacgaatatgacttagaactgcactgaatccttgcttagaacgctgattacctacataaaatcgtgcagatacacacggactatcaaatggaccaccaaatttgctcactaaaaagtaaaatccaggtttagataaaatatctttgtgcggagttcccaaaaaccattcaccgcccttgattgtaccaataacagtagcacctgcattattcagatcagtaacagtcatgtatttcatattaatttcctctaattattttctactccaaggccgcatgaatacacacggccgataaattaatcgtcacagtcgacgctcaattcccagaactcttctacggtataagtttcagtatcattttcaatacagaaacgttcattgctgttgtttgctaaagtagcattaactgtcattttctcgctagtgctcttaagaggtgaaatacgaattaactgatcaccattatctaagcaaaaaatttcaccaacttttacatctttaaaaattttcataattcacctcagggagtataaaatccaaatgcagttgttgaccatcccatccaatacggaaaatttgcaccaacgtaaaacatgagaatataaaaccaaccactcagcaaatttatcattttacaccattccaaattgtttcaaccacagattttaagccattttgatgaatgtccattccgacaactgccatcaaataaattccaactacaactgaacctaaggcaaaaatcagcatgaaaatgaataaagctggaaaaatattatcgaaaaaccattcaataaatgtaaaagcactacgtttacgcttcatattttcctcacataaatccaaagtaagcgtttaatacatcaatcattaaaacgattgggaatatactcaaaactattagtattataactacattccatatagctttaacaatctttttcattttctgttcctccgtagttgatagggtaatagtaccacggaagaacagtcttgtaaacagcttttttaaaaatattcgtaataaatgtgaataccaaccactaccgctgaaacctgtgcaacccaccacgcgcaagcaataagtacagaattcaaaattttcataataacctcattacaaaagtaaatgttaaacaaattactggaatactaattaaccaaacaaaacaccaccatagtgaactcatagctcaatctcagcgattttcatttcattactattaatagctgctttaagattatctgaaagaattacattccagtggtcattcatatgaccattaactaagcgtgtaatttcttcgggagttgaaaaataaggcgtatcagactcccaatgcgatagtcccaagcgagtataaatcataccttcatcatcgctagaatattcaactgacacaaactcatcagttattttatgtttagcgtaataaaatttaaatttcattttccgctcctccgtagttgatagttatatagtaccacggtccttgtggtatgtaaaccgttttgtgaaaatttttaaatggaaagataccatccgttgtagttgctttttcttacaaccttacgaaggtcttctctatcaccgatgaacttcggagtgtactggatgacacctggatgaatttctttagtgttgaatataattatacagtccgcgacttgatgatttagaatgggccctagatttattccagaaccatatggatactctccgctgcatcccgttgttaccgaaatccaacgcgagtcagtttgatgtgtcttaacttctacacggagcccacagtattttggatgtgctaaaacatcccatgcatacgtgtacggatcatcggcatcttcttgacctttgttaacatatccactcaaccaatctgctaccacatactcggcatacacagcaatacggcatctttcgataacttctgccttatcctgatttgggttttgttttaaagagtatcttgcagtatcagcaattttggccttcatttcactagtcaagtcactgttagatagtgtaaatgacggaatctgaaatagtctctgcaaacccggattcgttttctgcatttaaactttcctttatgtcggaatcataatttctcttaaaacaaaagggccgaagcccttattttatttgaattgtgcaattcttttttctaaacaatctgcgtaagatttcattgagatgaactgtgaaagcagtaattcttgctcaactgcactaactgttagaaactttgcgctttctaaaaatttactcagtgcattaattttgagcattaattgatcgtattcttcttttactcgtgcttgataacctaacataattttccttagttaagggccgaagcccttatttaaattgctcagtaacgtcttcaattacttcatactggcaggtacgcattttagcatcgttgtaatcaatcggaattgatactacatcgcgaggatgaactttaacttttacaactcgactagttgaactaccgaagtgacgaatataagatttagaacatacatgcaaaccgcgggaacaagtttgcgtatcatcgtcattcacacgagtacgcggcattttaactactttaccaggactgttatcaaaagtgtttgagtgacaatcaaagtaattgctgcgaactactttccaagcatagaagtaaccatcttctgtaatttcaatatcgtttgctaccaagaaatcaaagagtcgagataccgctttttggcttgggttttccagcagattttccaagaacggaaaataaaattcaaagttttcgcctttttccatcgaatcaagaatacgatcaaccaaaccagaccgcaattcaatattttgatagaataagcttccaccttcaattcgaacatcgccggaaatatatttttcaacagcgcgacgaacattaattttttgtgccgcttcttctaacttatctgctacgagcagattaagaatttcctggaagtttgaatgagtattaggagttgcgttataagttacaccgtcaacagtaattgaaatgaattttttagatgcattccaaataatgtcagatttagcaactggagcaataactgcatcgctattaactttaactgtaatatcaccgctaatagtaactttagagcgtttagcttcttcagcatttttcaaaacacgacggattgtgtcaaccgatacaccttgccaatcagccaattcctgttgggtgtaattaccacttgaatacaatttaacaatttcagattgttcgtttttggtcaggcatttaatattgtacataattttcctta

SEQ ID NO: 10 - DNA, 139943 bp, bacteriophage
cttatttggtgttattctttgtatcaatcagctcacggtattcaatcatagcaggggtgtcccaatatttcaagcctacatgcttcaaaagtgggtatttcttttccaatcttgcaatataggccttcccgcatttaactcggttggcgattaagattttggcacgatgatttagctcactgtgcttccacgtggtgttaccttcccacttgtggaaatgtggccgataatttccaaaatcttgcatgggaataattttccctaattgtctatacaggctgtcataagaagtctcatttgctgcacgggtcagtaagaatttccaagcatcctctttcaacaggtgctccacattcttctctgtaacatactggcaatcaggatcagtccaaagcagacgagattcagataccagatacagatcttcaccttcaggaatctgaagtgccgcacgtacacggtcataatcttgctggtagatgttactcatctgccccagccaacaacttccacgttggatatcaccctcataagggatgcagtgtttaatcttccggaactctgccttagtaatacgctcacggcggaagtaaccatccttctcaagttttttaacccaatagcctggctcataatgagtttttgtttcacctttcttcgcaggtcggcgagggagctctgataacaatttgatcgtatctgcaaagaacgggtggtgtgccgcctctttaaactctttcaccagatcagtgttccggcaatagaaaacgttgcgtccggtgatctcgcttaagtagttacacttatttcggttatatttgccgtctccgtcgttaaatactaaataaactccccgtaagaattctacctttccgtaacaagcgtaacctatgcggcctttatttaagcctccagcgaagatctcacagtcccccaaatttcctaggcctgtctcttcccatcgttcccacataaaattcttaccgaagatgtgcccgaacactccactgttcttcatcatctcgcgtgcttctgaggatgtttttgctgtctccaattccgcaacaacttctgccccacgtaaacggataccctctttgacaaaagcctccaggcgatcctggaatccaccgtcgtcatggccctctatggtccattcgcgcccagggttaatattgcaatccccaataggaatctctacacagattgcagggtagtctgtcaatgtttccaggaatttagatcggtaaggttggtgacccattaccacgcgactctcgtcagagctggtataacctttcaggatagtcattttccaaccatctttctcgtagcgatactgcgcctcaaccttgtcaccttccagcatcttactggtcatagggtcggtaacggtaaacggaaactttgcatagcgtaggcatgacgcaatagcagtgcgatatttcagaacatgctctttcttaacatggaactgaacttttaccccgttgtgctcttcagtcttccgctcacggatcttggtaacgtttgggataccctgatccaagaacaatagatatgtgctttcaacaccgttgtgcacactaatcacatcgaaagtgtccaccatgctgaacggggcctttgaacctacacctttattacctaccagagcgttgctgttgcgcttggttgactccccgaggttcatgaaagtgttgcggaccatctcttctgacatacccaatccaacgtcctgcacaaagaagtatggttcaaggtctgtaggggagtgaatgatgatcggtacatcaccccgtccagactcaacatgggagtccacagcattgaagattggttcacggcagcttgccagcaccttatcttcgtaaatccctttaatgattagcccaaaagtctctttgttcagagaaattgagcccctggtgacctccatatttccggttagtactgctttagtttcattactgtttacaatcatttattgcgctccttgtagtagatatgactcccgaattgagctgtcctctgcatcttttttgcccatttcggtcgtactttggttgtatggtagtgtgttgctccacctgttatgtccatagccatgtatgcaacatggttgttattatagacctttagaagcatctttgcaagacttttagcgtgatcccatgaatctttttctgtcaccttaaaagttttgccgtggtttgtccacgaaaactggttaggttggtagacaatctttcttatagtgtctgggtatttggggtgagatttcctgtttagtgtggcaaaccctgatgccagcatacccatcgtgccatcccctctagcctccctgtagatattgcatgccagaatgttttccttagtatctgagggcttgcaagtatgatatactttttgttttggtgctgcaacaacaggcagcgataaaaatgcgctcaaaataatagcaaagatcttaattttcacaataactccaaatagaaaatccccgccgaagcgggggaggtcttagaaattaatcgtagtgtgccaaaatctctccatcgttgcaagttccctctacaaagttatgaagattcatgcactcatcttgatagaagaatttaccgcttttcagccgtaagccaaacaactccgcatctccacgatggcaagcctctacaagttcatagatttcatacggcaactctccgtcgtcatggaagaacccagccttatcgttgacatagatgaagaaataatcactgctgtcgcaagcgtccaatattttaaaccagatttcatctacatctttttctcggatatcgatcacacaagtggagctgcattcgtactccttctccggctcctcggtcaataccaccaggtagtttccccgcttacctactttagccatacaacccccttaagctttagccaaaatggcgctaaactcttcaccaaactcttttacaatcttcatcaggtttgggtatgctttgatcagctgagcaacaatcttgtcacgccctttgccgataagcaaggcatttcctaaggcattaggtttcatcatcgccataaagactgagaatacaaaatctcggttctcgtccttgaagttttcccaaaggaaatcgaggaagtttgccacgcagctgacaagatcttcgtctgagatacttgcattttccatcatattacgaatagcgatacaaccttcagatccaagaatccacaaaatgtctggctgcttaggacctacgtattctttgcaaccacctgccataatccgaccgatttcaggtaaattgcgtttcttggtgtggtatgtccagatctctaccgctgcagtgtgaccaatagcaccttgcagaagaacacgggccatagcgtcagaaataataccgctgtcaaaatcgtgcaagatatcagatgcagcaacccaagatcgcggtgtggcaaaagatggacaattaatctcagccatggcctcataattatcgatagctgatggaactcttttcagatatccaattacagaggagtgcaccccattaaggaatgcgtagtcctcaataaacacctctgcattgcttgtaacctctacaatgataaaacggttagccagaggggcttcgagcgccgaaagaaccgcaccatctgtagaacggttaccagcagccacaaaaacagaacccttagggaatgcataggtaccgcacttgtggtcaagcataatttgcattgcaaccttttgcaggtagttatctgcatgagtgagctcatccagaaagataattccgctccagtcaggatccgcaggccaaaattctggaattgcaaacactgtacgtgtagttccatccgcctctacagggataggtagcccagataagtcggcaggatctttatctgacagtcgcacgtcaacaaggttgtcatctcgctcaccgaacatattatcagcgatctgcttcatcacctggcttttacccacacccattggtcccaaaattaggacagatcggctatgacgttgggcaaactgaataatagctggcaactcacggacagtgatttgaccactttcgaatacgtttcttgacattagtaaaagtcctctacttgtgtgtaagtgttttcaaagttttccaaaacagatatcacatcggatctgtcaatatcatacgtgactctccagttgtacgcaaccctttctgctgttgcctcttctggcgctagtcgtctgctggcataaaagagtgttggagtacactttcttgcttgccctctaactttcccataataatatctgtgaatatctttgtcaaaatttaactctttttctgcacgaagttcatattgctggtataacatctctactactccttaagcagcatccttgccgccattcctgcccactaaaatgcagtccgaatccagacaaggttcttatctgcccaatcatagaggcaagtcattgcactattgaattgctcacacggaggataatcttcttccatctgacgcatagcagagccttgtgggtaaagctcccgtgctgcaaaccacgcgtcgtagtcatcaacggtgtcgaagtagtatacaacatcctccaactcaggatcgaactttgaactatcaggatccagttgttcagggaacttggagcgtaacttgccagccacaatacttgccaactcgctaacatgcttattgtcccactccactagcttcccgtcttcagtgatgcgtcctaaccactgatcatgaaggtcaactgttgtcttccaccgggccattatcagtccacctcttcttctcgttgtagttcaagatacccgtaggtctggacatcttcaagggtgtggaactccccatctgccgctaatgcacgaacaacttggcacaaaaccttatgaggaacttcatccagaccaagattcagtgcagggaacaccttatctaagtcaacaaaataaacgaactggagctcaccagcttcaaaaggtgtatcttcaataaacatcttctcggcattagtcaagatctgcactttcattattctacctcctcttctttttcttcggcattagtttcatggctaccccactctggagtttccacctcgatagtaaactcacgcactacacggtaattgcccatgaagcgctccacttcgtcaaggcttatggagaagccattggcaaccaggtctgcagcaccctcttctaccaggtagtccagattggcttccagagcttcaggttcaaaccctgtcaatgcaatcagataacctttcccttcatcagggaggacaatacatcccaactgattttctttaaaaaggcagtgaccatcattgttaattgggtgttcattgcagtaaatagctgcacgataagtaactttagacatcggtaaggtctccttaggcaattgtcattttacattcttgaaattttaacacaagacggtgattgtgtctagtgtctaaaaagattttttcaaccatcaggcacacggtataaccgtccatcttgttgacaacaaaatctccaggatgagggaggatgtctcccggattggggaaacatagtccactcagaaaggcatcgtcagtggtggacttaatagatttccacacactgtctgcctgaacatgttcaccaacgtaatatacattaccacatgccttcatcatagtcaaaccctcgcataaattaaacttgtatcagtatacttctttaatgggtaaatatcctgtccatagatgcaatcattaaacacctcatctacccaaaggctacacttatatcccatcatttctaaaacacccatctcttcttcggtaaacttatcaccgctcttgcaagatgtcaatacctcattctgaactcttgctacctcgaagcggttattggcaatatcgctattggcgatcaaatactcacctagagggtgtgcggcattaaagatgcacagtggacggctgacgtaatagtctccgggtgtataaaaattgttgaggtctttcactagaacattcttatcagtcacttcatttataacatcatgcatatcgcacatctttatatgtttgaggattccatcccccatcacaaaataaaaacttgctgagacactttcggcatagatcttactagatccgttgtagttgtattttactcggatgctaacgggggtttttcctgtcgcgttagccatcatccaaagaaatggcagctcatacttctcctctgaggaaacaaaaggtgaggtagccagagatcgaaaacctccagagaagttgaaagttacagaaccgctccggcggtatgataccgcgtattctacttttatatcgacgtacccattggaataggtgtgtccttcattatctaaatatgtccacttatcagacccagataccaatctacgctcaataaccttcatcactacaggaattagtgggttggtacaaaccgcttttgaagtagctttatcatctaaagcctcgtaaattgcagaaaggatgtccccagctgaaagattggttgttatgtcctgtttccaccgcgtactaaaactgttaagatttgccataagtaagtgctcctatgttagttttctttcgaatgggtgcactatatcggagatttatagtaaagtcaacacgtttttgatgttgacatctattgaaacaattgatacgatttcttcacttacagagcacgagagacaactcatgaatcttgaaaaatattatacaccagaagagttagagcgcctgctcaaaaaatatagacgcaaacagaataatgcacggaaacgagatatagagttcaacctgtcatgggaagaatacctcctatttggtaaaaaacttttaggagatggagtatgcgactatacccttataccttttgacatgcacacagatgaaaacgggctgggaaatcctttctacccatctttggagcgtatagatgatgaaggtccttacgcaattgacaattgttgtgtggtagggttgaggtgcaatgctctgaaagactgtctggtagataaaaagactgcaatcctgattaaagacaaaactgatcgaaaaattgtccagcagatgatgctccacctgagcgaagagcgtatggagaaattgaaaggtgattatacttttgaagatttcatcttgcaatacgggacagaagaagataaactagcactatttgacgaagaggaagaagatatgtcaccaatgcaggactttaaaaatttcatggctgatcgtgcagccaacaaacacatttcagacatcgtgaacgagactgtgacagaagaagttgaagaacagaactctgaagaggaaaaagagcctcaggaggtcgaagaggggattgcagaagaggttcctgcactgcctgatgatgttgagattgctaaggcttacactttctattgtcaaacgttctacgatgcaggtatgaaagttgatctgtcgttcagccaatttaagagttcgtatattcgcaaatgctgtgctttaactggtgaacgtctcggagctggacttaaaccactgttggtgaccgactggaataaaggtttcactaaaggaaactttatggtagtatctccaattatggagaaagctatgacagatcttatgaagaccacccgcatgacaatgaccgagttggcaggtattttcaaacacgttaaataatgacaggggccaatggccccttctggagttttaatggatagcagaagttcagaaatcattacctcacagaaagatgatgccctgagaatgttgcaggctgcacgtatgtatctccttgaaaagctgccgttttatggcacactactgtcagggttgcagttcgtagaaaaccacacatggtgctccaccatggcaaccgaccataaacgcatctattacagtcctgagttcattatgggattggctgatgaacgcaaggctattcttaaggcttctctaactgacgagcagtttgagatggctgaagttttctattccccaaaatctgtgaaagaggtggccttccttctgtcacatgaggtggggcatattatctgtgatcacctagtccgtggtaaaagctttgagccggaactgttcaatattgcttgtgatcacgttatcaacacaggccttgtggttgactttagcaaacctccttgtgttttcttcccgaaggggaaaagcactacgttcctgaaaggtaagccttttggcttcttagccagctgctactgcgacatgaagtttcatggatggattgctgagaacgtttatgcagttcttgataagcaaagagatcagaataacggtaaaagtaagaacggtaaaggtgagaactctcaaagtgataagcgacaaaccgatgatcacatgagtgggaacggtggcaccagtgataatcttggaaaggctatggggtatgatcagccacaacctgtaatcagccaatctgataaagatcaggccatgcaggactctggtgatatgctggaggcagcaatgcaagcgtccggaggccgttgccctgaggcggtgcgtgagtttgtcaagaacagaggtaaacctgtaatcaactatatagacatcattaagcaacgcatgttgtctaaaagaaaggccgaactgacctacagaaaacctggtcgccgatctgggtctttgaccagcacaatgcgaaaagttggggctataaacaagaaccagcacgttattgttcctggtcgtaatccggaaaacactatagatattgtggtggctttagacgtttctggctcgatctctcaaagaactttaaagaaaatgttcaatgaaatcaccggattgtgcaatctgtataaagagtttaaggttacaatgttctgttggtcaactgaggttggagaggttaaagtatacactcgcggcaacatagacgagatgatcaactatgaggtacactcaacatggggcacaacagctgcttgcgtgttcgagtatctggatgccaacatacctaatgcaaaagatgtcatcgtcctgaccgacctatactttgagcataactttgaacaaaaggctgttgacaacaagtggaaaaagtacgatactttatgggttctcaccgaagggtataataaaaattatatccctagctttgggaaaactgtggaattaatcgagtacgctaagtaagagaggatgttatttatggcaacagaggtagtaattaaagctgaacgcccagttaaaaaagctatcaacacgttccctgtgggaaccattgtgagcatgatcacagagtcaggtcgtgtatctacgctgctgattgtgaaatctgcatgttcttcttgtgtgtgggcttacgatctggacaagaaagaactaaaatattttgttggggagctgaaagcaaccgagctcgatgctcgtatcgaagtatttggtgaaactatggaggaagagtaatgaccacgaaaatcactattgcagaaccgaaagctaacacgcaacctatcgaaaaatttaaatgtggtgaggtggtaacattcacaccagataatgaagatgctaagattttcgcaatggtcacagctgagtggatgtgtgacaacaccacacaggttctgcgttttgacacctatcttaccgatgaaatcaggaacgacaagattgtgactggtgtggatactgagattgttttctacaagagctttttagagggtttctgatatggcaaaaattcgtaaattatctagcaatcaggttgtgaaagactttgaatctggagagattctttatgttcgtgatgcagatgacgaaggtgaagatctcgttatgttggtggggcacgctgaggacggatgcatccaagctgtttttcttgaaacagctatggtgcactggatagagctggacctgaaagcacgaaaacctaaagcagaaatcctgatttacgaagattaataaaaggagagagccgtgttgagcaaacgtgaatgcgacagcattagcctgaattcttataagaaacaatggtttggggtagaagtttgccgactgcggctaggctcctacctgaacttcgtttattatgagagcgacagccgtatcgtttcttatgaagtgttctacactaagaacaccttcgaactacgccgtaaagtggatggcgggagaactaccacccagaataattgggaaactatcctccctacagatgttataggaagtcccctgaatgtatctgaagatgaaaatcttatggttcatgctatgatgggacttgacagcttagagctggcgatctatgatatgtccatcgaagcagttaagctggactacatcgaaaacactttagaggaaggtatcaagaggtttctcagtgagaaattaaaagactactttcataaggagctatacctattatgaagacccgtaaagaacgtaacaaaattttacctggagctctcgaacacctgatgaagtgcagatctatttggcactctgccaaggaagggcagaaggtggttgtggttagtgacaataccaacccgtttggagattataccaccatgatggccccatatgtccgtgatggcgttgtagaagtggtcccttacaacggtctgcatgaacggcactttgaaagcactttgttagtggagctatagtcatggcggtcaatgtggcttacaacacaggaaagcttgacagagacattgggtgtcttgtcctttcagatacagaagagtattggggttatgggttgctgtcagacccacacccgagcaaccttgtatcaacagtgctataccgctacgaccctgtgccaacggtacacgacaaagacattcacgaccttcggatcaagtgtctggaagatctgctgaacaatggttgcaacaatctgcgggtagccaaggagaagcttacaaacattcacaaagaggaagtgatgagcactctcagtaagagatcagtgcacaaaaagatgatgctgaactttgcaatgggtatctacatggacgggtataagggcggggacccgattctcaagcttcgctgcccaacactgtgggaaagggtggttgacagtaaggacggcactgccctgcttgagcttcacactgcaggttggatatggcggtatgttgatggataccctctatgggcatgtgggcctggggaatttgttgacaggcctagtgcggtggtggacttgctattgcagtttgaataaaagtgagatataaggtgttcatgcacctaccaacaatacaacaagagagactgagatgacgaaagaagaagctgacgtattagactttgcactggaggctacgcaagaggctctggtgttagcttggaaaatgaaccagcgtgctgcagaatgcaaccgccgaatcaatgagattcttggcatgtctatgtatgatttcactatgcatgccggagagattcctgaattagctgctgagatgaatgatcttgacgataaaattaatattattctgaagacagcagaaacaactcaccaaaccgcccgtaaatttatcaacgagaaggtgtgaatatggactacagctactgcggggaagaggtcccttttaactacagcaatcttaccacaagcaatccatatgagactcgccacggtacgcacatcattgccattgactttgatggaacgtttaatgcgagccctttcatcttctcccgcctgatcagggatctgaagaaggaggggtggacagtctaccttgtgactttccgattcattactcaagacaatgtagacattgagtattggcgcaaggagcttgatgttggcgtgttttatactggaggtgttcagaaggcagcctatctggcgcagtttgatatctacccagatatctggattgatgattctccggcatgtattccggctaaaaatcagttagagtttgcaatgaaggagatcgagtataagtctgaagctaagcggaacggatggccatttattattgaagattacccagatcctgaaccggagtaagagccatgaggcgaagatatcatcacctgatgtggaagttatatcatggtgctgctaaagcttaccgcaccgtgtttggtaatgacaatcactgcattatgttacaccttaccgccattgaacatcacaatgagtggattcgtgcaatcgtaataggtgacaaagattttaagtaaagtattgctttctagatggagactgattaaatgtgcaagtgtaaatcctataattggaaagtgaaaggtgccaagcatcaaaatgttatcgttgatgtgcctaaaaagctccgtgacggcaaaaaacgtgtgtgccttgataagtgcatggctaagcctatcatgagtctatgggcggcaggattgaaaactctaaactgctgctgtggtcataacaaagatgttccaagtatcattatcccagaagatgcagaccctaaagcttatgccaaaatactgacccgctaccccagcaccttcctgatcggaaaatggtgtcacgatgaacttcaatggtgggtagcatacggtagtataggtactgcttttggctttccagctctgtcagagcgctacgtcaaagtgtcataatcgattttaaggcctcaaaagaggcctgtgccttcaataactccaccctctcttgtgattacacccacctttcaaaaaacttccccaaaacgcttaaaaatgttgttgacagcacacacctcagtttgctattctcattatcacagatacagaacggagtaacaaaaaatggcacatgtgaatattaaactacattatcatggtagaaaaccaaaatatccaatgcataaagtattttggggattgcatatccaagaaaaagaaggtattggttactggttttgtgaccacgatagacaatggcatacccatgaagaagtgtgcactatgatggagcagggtattaaatttaatttctcaaactatgatcatggtgttaattgcattcgaaaattgaaacgatttcttagaaagaatcctgaacttaaagggcttacattctttatgtctcataactacatggggtatagcgctactgtaactgcaaggattaagtaatatgagcaaagtaaaatttgttaaatttaaaaatcctaatggaataacagcccttatgatgggtgtacactttacaccgggcaaagagtatgaggcagatgtatacaatgggatagatggtaaaggtgggataggtgtgtggacaaaccgtggagaaagatactttatcaaggatatagatgctcactggggtatttgggaagttgttggagatctgtgatgatgaaatgaaatactgtttcttcggcaatatgtaatatagattggttaaatatggagactgatagagatggctgatttttgtaaagactgttctgaagagttgtttggtcgtgactgcggagatctgaaaggattgatcactgaggatcagtggaaggaaggctatgcagcacctgttatttgtgaaggctgtggttacacctatgtcgatcatgaaggtaagcgtgtccagccgtctgaagatgggtcgtgttgggaatattactaattataaaaagaaaggggccgtctggcccctttttatttgcctcctgttaactagggaagtttgtataagcttcgagatggtattgctggtcaccaggtagcataacacctatgcttgcaacacctaatgttctaccaccaggattccactgaaacttaaatccaatccaacccgagcttctggctgcatcaatgttgtcactgtacccaaaagttgctaggccatcaacacctgctccgaaaagcagttgtatctggttccttggtaggccaataatttcaggtatgtaagcaccgaaaaatgtagggttggtggttgtggtcggattgtccatgaccggaccggtaaagaccctcatattggacgttcctgcaggtctagggtaagccccgtcaagaggatttccttcccaaataaaccactgaggtgccatctgtctgacagtaaacgatgttgaagacgttttgcggcctgcatcatctctaactacaaactttatggtgacattcccagtagctttaaatgttaccagccctgtggtggcatccactgttgcaatgttggtattactactttcccaagtctttctaatcccggatacgttggaaggggtgatagaaggttcctgcatctgcagtttaccgcccacaatccctatgccgttgcccggattatacagcacaccgacctcgtctataatgttccctgctttgagactatacttccttgagaagttgtaagttccgttataagtgtgtgtccctgagaatgtgacatctgccttcccgtaagagatgcaaaccaacgcatacttcctgtcaggcaacgtttctccagtctctgggtgagttttaccaatctggaacacgctggggtcagtagaatcgtggctatcgctgacagagcttggaccacccatcaactgaggtaagcaattccttacccacgtccagttattatcgctagagaagtcaacagtcaaatcaaacacaacccactcatttggcttccacacaggtgttgcgatggacttgcctacaccacctccttggagtgttgccgactgctcggtgatcagggccgcataggccagagttcctaaactcagagtctggcttgctgtcctcactaccttagaatcagcatctgtgaagttgttgatgatttggaatgtgccataagtgtttttacaggtaattctggcgttcagcgtgtcaatcttcctcacatctgccatagcagtgttagacacagagaagtcagaagctttagctgagtttgccgcaacagcaggatcaacgttaagagttgcgttgaactgacaggcaggggtaaccagcagcttgttatcacctatttgcttccatgaaatactttggacaggtagattccatttaatacctgagaaaactttagcaacccttggccccaaagctccagtcctgttgtctttacagcacatagacatggtgatcgttgacggagttgcctgaccgaacaattcctgtgcttttgcagaggacatagtgtagaaattgtccttaacaaactcatcagcggctaaagatccgtcagccctccaccactggacctgataccctgttttatcccagcctccaacctgcttcaagtcctcccaagagatttccagatcccccgtggtagggttgattgcagcagttcctggtgtaccggatgaccacaatgggatatcaaaccacgcaggtttaacagattgcactgcattaggacctattgcagcagcaagttgttgacccatcagcacgcgagcatctttcaccaggccccattctatcatagacccagagtaaccttctttcttgtaggcagaggatccgttcaaatggatgagcctgctgcagtcgaagccatacgctccaccaccgttaggatctgcaaagttggttatgattctatccctaatatttttccatgccctgcccccaatctcatagtcatggtcataacatctttgcagtgttgtccagcaaatgatcgccatccttctaccatcgctgaatccaaaggcctgatcgttaagctctctccacaagtagcagttagtggtccacatggccctatgaatgttaaaccagtttatagatttggctgagttgtcccactgagtcccaggtaattcaggccatactgcattaaccagcatgtcttctgttcctgcatcaaccaagaaccctctcaccttcttacccatgcctaccctatcttttgcaatccagctgccaaacaatctcagttttggaccgtagacaacatcttccggatgctcaaaagaaacatattttaggtatattgtagggtcaccataggtgccatcacaaacagctttgtgcatgttctcgccaaggtctagacgaagtcctgttacaactttagacgtgtcggtgaatttgtctgttaaatcaaactcataccaccaccaacctgcacccaacaatactttcttacaacgctgtgcgtctgtatcagatattctcttatcctctgcaaaaggtgagtcagcaaactgatagtgcagagcgatctcaaaaggatgtgtggatgtcccgttttctgcaagaacttgtttacctatcaggtcgcacttaatgatcatcacaacacgtttgtatccgtttgttaccggaatttgcatggacatggatgtcccatccatgtttgatctcagtgcagtcatgatgatataagggtcaacggcattgcccagagtctcaggaccggggattatcttatacttcttgacctgccccatgatgtagtcactggcgtaagttgcctcattcaagcaagatcctccaccaggtaactcaccaggtccccagaaaaatgcgccgtaacagttgtagaaccacttgttaggatcgtatttattcttgaaggtctgaacctcgttggcctgttttgtcaagaaaacctgcgtatctgtgaagattgcagggtttactctcgcctgacgtggagggtaccctgttgattggttaaaccactgattacaagagtaatccctcatatagtcataatcagagtatttgtttgcatcctcgttccaacacatgttcaggttggtaccacccatgcatacaatatattctgcgacatacttatcacttctggtaggaatacctatgaaccatctgttaacaggttcatcccaagctgtgcgctcatctttaacgcagatagcaatccagtcatgtgttcctgttttcttgcacacatctcgcttcataccatagtagaactctttagtattcggctcaggtgcatttatcaggtaactccatgcctgatttgcataagttccattggtgcgtggatcatgatcaaaggcatacatgatgatcctttccccaccaagatgttcgccaagagtaactttgacattcacatctccgtaaccattgcgaacaacatccatattatcaatagagatacctctgggcgtgtaggcaattttcagcgaattatcttcactagtgccgccaagtgtaatccctatgttgtttgttgtcccgtcgacatatcttactgtagcttcccagcgtattccgaaatatcctgcatcatggctgacaattttcagtgtacgagctcccgggtgaggttttccaggatcaggccaagggtctgggtgttcgtgaacagtcaacgacgttccgttctgctcattaacctgcaacattttaccacccttgccattaggattgaactcccacaaggcttgtgttttcacaatattgtcatacgtggcgcgtctttgatcgtagatctcttgggtcacatcataagtgactgatccagcatccattctgtggagtctgaccatatacgatgtatccccttctactgcaggctgggtcccattcagcccaaagtatacagtatcgttaacatggaactgcttgtttctaccaacggtatgccacttgccgttggacggatacgcaggaactatagtgttccagttcaaagtccttgtcgtataggttcttccagtgccatgcttgtcatggtaggtgatcttgatagaatacaaaccacgtctgttgatgttacggttatactgggtgaccacaacttcgttagcaccaccatggttccagttagtggagaactgatagtttgcatctgtaacaacagtgcctgcagcatttaccaactcaatcttgtcaataatgaacgtagcaccctccggctgaggtttcaatttcatcttgacagtatctccgatgtaaatgttgctaacattgctcacaccattgacatcaaagatgtcttcgataccccagctatctaccgggacatttttataccaattctccggaatctctgtgaacccttggctgttaagtctgccgccaaagaggttattagatcctgaaaaactaccacgtggtattcctgaccaccaaagctttccatttaccacacagaatgtgcctaagaaaccttccctgtggatcccttgaaaataaacgctttctgtccagcttactggctctgtctgttcaacaaacttagctgttgccagcgctctgtaatgaataaaattggccctaggactattattagcagattgagcaccaatatcgttacacaggtttctggagaaaccacggtactgttttgtaccattattgaagaaaattccactagtcccgtacccgcgagccataattacttcatgggtataggtgatgttaaggcttctccacgtgtcgtcaccccaaacatcctgaccataaaacacattaacaagctgttggtcatcaggtttgtgcatcctttctgtggctataattgcaccattaggtccacacatgaaccctttccatgtctcgcccaccgggatgcctttaaactggtcaagagtcacatgctcggctggataaactagtgtgtttttgctgttatttcttaagaaatcgtaacctgcaatccagaatccgttaggaccaccaaaaataaccgagttgtcatgaacttcacaattaattcttggatttttccaaggacctgtctctggactttcagatgtttcaccgatcttaactggagtagcgtgttgacttttgtcaacatgaagagagccgtaagtattattgccagagccgtacaggtgaagcataccatcagcctctggtgcagcaattacccacacggtattgtttacgccacccattacttcaacaagtctctcaggatgggtgtccaaatgcaaccctgttacgatctgttccggcaaaggtgtccactctctgacacaaacatcgtttccacctgctgcctccgatccgataagaccagctgtgcaaccaatatagaaaaatttattatcgaatgtgcggattacaaatgcacggtcagctctccaaacatggtctacgttccaagctgcctcattaggatagtttattgtatcaagatctccagtccgacactctccgaacctattatagccagtaatattaagctgaccatcatcaaaaagtatagctaagctatttacataggatactgtgttgcttgtaccatcactgttgtctattgggtatgacagaacagcaagttccttaattccacccctcttatcgaggaaatgacgaccaagttttagcaaagggattggaagcattgtgttctccagataagaaaaccgccccgtcaggagcggttagatatattaacgttgtgcaattactacgtctacaatatcaccaacaccacaatacgttaattgcagcaaggtaacactgttagccttgttgttaataacaggtgttgccgacaggatagcatacttatcgtgcaaagtcacgttgtgacctacagcatcctgaatgacatagataactgcagtgaatggataaggtttatcttccgctgatgtcccaggccactgtcctattgtaaaatcccctttcgcgtggacaacatacatgctggcctgcccgttaggtgtccatgtcccactggacgcgtcaacctcctctaagtcaaaatctacctttcctgcgtggaaagtaggggcagtaatggttttacccgcctcaatttcttgagaggtggttatcttaccactggagttaatgccattacagacaaagttgacattagagaagtctggcagccacccggtcactgtgccggatatttcaaggttgtgaaggtgggtggtgccagtccctgcggcgtttaaactaacatctccatttacctgcaagtttctggtaatgttgcagttttcagagtttgcagttgttgcagttaaagtggtggtggttagctcggtaattgtacctttattggctgtaagcccttctccttcaaaagttgcacgctcattgactcttagagtattcagagctatattttggatagaggctgtacctcgaataactacagacccgccaacctccaaatcgccatttatcaatgcatcacccgtgctttcaatatagctagggtagatcatggtgccatcgacagagtatgttatccctgtaacggtacctgtcacctcaaggttcttaaccctggtggtcccatcgacctgcaatgtcggttcggttgctgccttcatggcattaccacgaatgtacacgtagtcaaaaaagttattacccagaccatcaaaatgcacatcgttattattagccactggtttcccagaagttatagtgtcagctataaccctgtgggtggacacttcatgaggttgcagctctgtacttctccagtctgcatgcttaggatcgctccacgcaaaagtaagtgtagaagtatttgccgtgaggattagattcctaaagcgtgcagtagaatctgccccattaacaggtccatgtaaggtaagggtgccaccaactatagtgttagcgagttctgtaagaccttttaccaccaaagaccctacagtaactttcatcccctccatggctttaaatatgctatcaacatagtcaacaacaaactctgtgtttgctatggactctgacttatcgtccattggaggtgtaggtactcgtgggtcaccttcgaacctcgggctgttaagttttgcgtagtattttgccattactgcagagtcggtatataatctccagtttggagattgtgaaggatctgctggcattctaaccgggttagattttgatgctgcgggagcgtaccaccactgagggcctgtgtcccctttaaactcgtacagctggttaaaaactgttgtggatgcaccatacgcccaagggatcggtggcgttttaaaataaaggttgtcaagcatggcttttcgtaccgtagggatggtggtcccatcctctacgacaacttcatccacagcgttaccgttgacaaccaagtgcaaacgttcagaatcaacaattacttgatctaccgcctgctcaaagcttgtcatgtcttgcgccatgatttctccttaagctttttgctcttcgtttttaacgtggtcagggtgctggcaaccccaccggagcgagatgaatttgctaataagctgggggcaagctactgaaggcgcgtatatccacgcataccattcaggaagcgtatcattataccccatatgaataaacaccccagtcatcaccgccatgcctatgttcgaccatagcttagtttgggacactttcgtagggtcatcagatgccgcaaccagtccccataaaaactgagttagtttcatttaccctctttttaagcataagatatagtgatccattgaccatttacaagtttttggatagcacctgtccagtaatcaccttgataagggtgtttataagcgtagttaccagagcacatcacatgtccagggtagactcttgactctctgtaggtggttttgaaacggtttgctatccttacatcatcaacccctctgctgggcatagggatagtaaggttaccactactgtctgcgccgttaccatttaccctgcggaccacgtttcttccaccaactgttgcatattgacccctgactgtttcatcgttacaatcaactcttccacctatttgagcgcttccgcaggattgttgtccgttaacagtggctcttggtatcgtgaccgcattggcatttgcagaggaactttttgcatcgttgcattcaagatttccttggatggccagtcttgcacggttggcagttatagcattgagcttcatagccgaaaacacaggctgcccaccagaaggttgaaatctccaacggaacccgtctatttggtgagaaggatcatcaaggtctgtgccgtcagcaccaccgatgttgtccataatccagaaatccatcgtcgtcttgtctggagttatggtggtatatattgccgcattgtctgttgacgcagatgcaaactcgattctttgaagacctaaagtttgagtctgagtcattatgtctccagacttgtcaacatacagatcgtccatttcttcaggcgagtatacattgagaacttgacgtgcagcagctttgtctggaacgtctgctagattattagtgacccttaagaatctattatcccatcctgggacaacatcttctgttagatgctttaaccacgcagaaagcatgtgaagttcaaagttaacaacttcacatgccactctttgtgtcatatcccaacctttcaatctctcttctttttttggttgagacttattcaactctcccgtattttcaagcacaacatcctgattggcccaaatatcaagagggataactggtttagtcatcgcgttctcctgagaaaattccttaggactattttaacactttagagaacaaaatgcaagaacggagtcctttccgttctgacctttgtttaccttttactatgctctacgagcatgtgcaaaatcttttgtacatcagctcggataccggagacatctgtcctgacatcctgcttaaggtcgttaatatcggcctctagcttgcttaaccgggtctcgataacggaatcaagtttatcttttgtaaccatactgtttttcactaagatgaggtctttctccagttcatccaacctcttggaaatgcctttccatttggtgtgccactggttgaaagcccatacacagatcgggacaacggtacccatgcagataccgtacaatgccgccaaatccaactccacaacacctcctcttagagggtaggtcgctccgggaagaaaatgtcaggggctttagatgtatctatttcaagaagttttaccctgtacattttcaaatctctgatgttacgtttctggtcatcagtaagatcatattcaaggtcaatcatgtcttgataggcaccaattctagcagtagcccaagcaagttctgtctctatgacaccctctgcctgttgaacaaagaattcattatctgtgacaaattcatcaccaactaaacgcaaagcgtcgtggtgaagcataatgttttctggtacctcttcttttttggcgataaccacacgaagacctggagcaggccataaggcatcaggttcttctgtagatgtcttaagaattcccttctcgtcaacaagtaggaagatacaacccggattttcttgtcgtaatgttcgtgactgcacataccaatcgccatcatcattacgtaaaaaatacccagtgtatgcggtgtaatcctcaacctcttgaggggtcagctccttggtttccttgttggagtggtattcgccagatcccggttggtaaagtttaaactcttgaagtattttcatgctagtcctccgatctatgcataattaacagtgatccattgaccatttacaagtttttgtaaaggtcctgcccagtaggttgaaccacgcatctcttttttgtcaccgaaatgccagcctgtgacaacgtagccgttgcggattggagattcagaaactccgtcaacaagtcttgcaccgattctgatgtcttgcacacctgtctgcgggatagtgattgttacatcaccgttaccgttagccgtcactccattcacagagcgcaccacatttctgttaccgacaacacagtgctgacttcttacaaccatactgtcacaacttgcaccgccattaacatacactgacccagtcgtcaactgactagccacattacagttggtgaatgttgctgtattgctgatagtaaggttattgcacctcatgttatcgacaacttcaacattgcctaccactttcaacagcgcacggttagccgtgatcgcgttaaggtacatcaaagtgaactctggattaatatccggctgagttggctggaatctccaacgaaacgcatctaccgtagatgtaccaccatcatcaaacgacccagtattatcacttaacccaaagtcgagagttgtcttatctgggccaatagttgtctctatccaagccttatctgtctcggcagctttaaagttgatacgctgcaaacccaatgggcctgtcattgtatcacctgtaacttttacatacctggcgtctgcctcttccttagtaataatcccaaggtttctacgggcaacaggaatgttcaaaagatcactcaagttattatcacgtaccagataacggccttcttgagcggggatctgctcgtcagcgatgtattttgcccaagtcccgagcatattgaaaatatagttaagttcttcacatgagggcttttgaccaagatcccaaccttttctccacaaatcatcaatcgggcgtagcctgttctgtctgtgggtgttaggcagaacctgatcctcctctgcccaaatctctaatggaaaactaggttttgacattttatctcctgattatgagaagtctggcgggacaacatcttctacataccctttcagagcaacctgccccatatgaagcacggtagaatctctagcggtaacagtgatgctgtcagacattacttgcgggtatgcccacacatactgttttacctcagggtatctatactctatagttgccatgtttccgcaaatacatctccataaaaattcttggtaattcctggttgggtcgtaaccatataccggagcaagctctttactaggaacgaaccctgcaaggtattgtatttcagacggttgccaacctaacttaacgataggtatgtttacagactcttttgccttttcaatacctccctgcatcacccaatcgtagcactcagtgcagaagaaatcaagagcacctgcttcttttttatattggtcagcaaggttcagcttttgcgtaagctcggtttccataatggttgggaaaaacagcagagctgtcatctgagctgatgcagcgtgtgcctttattgcctttgaaatagccgcaatacgagcgccaagcttaccacgacaaaatgctacatacttgtcgtaaacaccgccagttttaggatcgtcaatagtcccaatatctaatgcatactcacctgtctcatcataaaacgcctgttttgtagggtaatcataaatacaaggtctacgagtatcggtattgaaccaccaccacggttcaccaacctgcataatcactggcaggttgtttctcatagcggctgatgcaaaattcttaaatactgcagtaaggaaattcatgccctcttcaatggttggagacaggaggtagctacaaggtgtataccctgttttagcgtagttatcgttccagtctctttgggtccattccaacgggcaggcatcgctgtaaagctcaaaacttacagactgcataacgtcgaagttatgtcgtttggcattgtacataaaatcatcatgccatttataagctgcagcgtttagcgcccctgttctgtttatagaccattgggttcctgaccatgtgtagtcataataatgactcataccaacatagtggtttatggttccggtatagcccagacgcttgatattgttcaacactcttaaaggagatacgttccacatatcgtcatatgcggtgcagatcccgacgtcgtgctctttaacctgaatattgttaagttgcatcattttccagcccgtgtctggctgaagcagatctaggcgcaactcacactctacattttccgttctcgggtctgtgctattacttacccagtctttaggcataagcggtattaaaatccttctcacctgccgaggatcaacacccatcatgttgttgttctgatccatcccgacgcagtcctcgaaatcaatatgaatctctgcaacattcttatcctctgagatgctgacagcatattgagctaaaggaacatagatgattgtgccatcaacaaggtctacagtcataatcatcttttcaggagtggagaagttgctggcattggttattgacattctgaaccaaagcttggtgtttctcatctcatagtgatcatcaaacccaataccgaaatggtcatacttgtcaactgtttcccaaatgcacccagccatacctccatatgttcttgacactaaacggttaatacaacagttgtcgtctgcaacaatacaggtactttcagtctgctgagtggttgtaacccaataccttgggtgaaacattctctcctcaacagtatcccaagatatcctgtcaagattctcatctgaaactattgtacatttcgccctttgtgttccaatcatcaccccttgagattttgatgaaaactccataaagaagcttcttggcaacctgttgggtaatttgtcaacaatttctacggggatctcaatactggttgccccaattgggatagttacatcgccctcaacatgattataatccctaccaggaacggcagtatcctgaactgttcggtagtgaaactgtgcagccattgtagagtaatcacggtaaggtttaaaaacagctgttgccattaaccctcctgtctagttgcgtttactgtaatactttcacaataaatggttgtggtgtcccaatcaggtcttacgtcaggaacatatagcaaagtagccagcccaccaactccgaattggttttcttcccacactgatccgaagccaagagctgtagagtccccttcaaaaccaaaagcttgcccttgcgattctgtaagacgcaaatgacaaggcaatggtagcatatctaagatctgatcgatagactgcaatatgtcaaagcaagtttttctaatatttatgtcaaacctgaagttgtctcctttccacgtatcgaaattgtctcttccgaacaattgtcgcaaggtggagatgacatcttcgcgagtcccgccccttgatgctgcggcctgctgaataattagtgtggcacgaaaatcagcatctgaaagtccattcctaagaataccaagttgattaccaacttcgtcaaggtatcttccgctggcattgttaagcaatcttccttcagccaaacctaccagcatcttatcaacatcctccaaccttttaaggtatacggttaagaatgtgactaaattaaccttctcagccagaaaatctccaggcaggtagtcaagacctccctgaacaaaatctggcagagtgtggatgtggttaacatccgacttaatctctgccatatctcgccgccttaaatagtttgttggaaagttatattactttcgtcgaggtcaaacacctcggtcatgttcgcaacaatatcgtttgtagtgtaagcttcatcagaagctcctacggatttaacttgaattaccagtctattaaatctgcctattgacacagcagcggatgcagcaccgaccaattggatattgtataacgtatctgcaacatccagtccgttaacaacctgcaaaagagcctctataatggcatctttttcggttgtagaaagcgcagcaccggagtaggtaattcttacatctaggcggtaggtgtttgccttggagtaataaattctttcagtttgaccgtcagatgtagtgacatcgtagaaaatattaccataagtcctgttcgtacaggctatagtttggtaaagtgcttggcaaatgtcctccgttgcaccaccaaacacaaccacttggaacttgtaaggaggtatacctttagcatcagttttatcggtgttgttggagaacaccctcactttctcaacacctttcacctcgcttacagcgctaaggattgcaggacgggtagccttagatgttaactgttttgtgctggaagctcttaagcgatactctgagtctttctcaacatccctgccctcattgaatctttctcggttggtaagcttgataaatccactgggagtaggtgacattgttgtcacggtttctgcctctcttgacagctcaccagcctcgttagcgataacatccagggtgatagttctttcccctacaatcggggatactctgaaatctactctactattaagtccaacttgatcaagattcgaattgtaccctatccacaacgttcctgtcaacatatcgacctgaatcaaatcgtcgttcaacagggttgtattatcgacaatgaattgcttaatctctccgtaaaagcttggcaaatcagaagagtccagagacttatctgttaaaaccagactttttgttttgatacttccatctgtctggttggtaatttgaaagttgtatttaccaatccttaggtctggagcatttattctgtgagcaataagattccctgctacttgcacatcgttgctaagaacaaagttgccactgtccagcgtataagttttggaatcataaatcatattgtacggcacagttgtgttgattgtcaactggcaggtacctgatgatttagaacggcctcttcggtaaataccctgtcttccaagaagctcatccaggtaaataccttctgccccatacagcgtctgtgatgcgtatacagatgctgccataagaataagttgatactctcgctcgttgaagatagtggtcagcttatctgcaacggagttactctgtacgttgaagttttcgccaaaagcacggatcaggctttgcttagtttcaacgattaggtcatttagggttggtataacgaaaccagcctctgtcaatccatacttagccacgtcactcctccggtatgaaaatctctacaaggtattttaccaaattttgtaacaatagtcaatctgagcataaaaataaaccccgccgaagcggggctttaaaggttagtcgtgagactcgttccaaggtccttggaaactagagttagaacggcttaccacaacagtaggacaggatattgcgacccctgttacagaagacgttgaccatggtgtgtagatttcaacaacaatatctatggtttgttcaccaagacccgttatccctaccgcacacatgccgttgttgtcgtttccgtacttcttacctgcaaggatttgatgtccggctatccaaacgttaagctgggagctggcaagagtaccattcagtttaaagaagaatgttacgttcttaccctgacctgaaacgttatctacgtatctccacctccaacggcaaaccctttgccgggagttatatactggagcacaatctccgtaagtcctgtgtgcaacaattgcaccttcgaactggttagcgcggataacagaagcttctacacgaccacggaaggtacctccggttgcatctatggtgcctctaaagctaccattattggcataaacatccccacggaaggtaccactagtggcgttaactgcccctgtgaagttaccagaactggcgttgatgttgcctttcacccacacatccataaattgggcgtgcccgttcttgttaatataccaaccgtatttatggtacccgttgccatcgtagttgtttgacgaaatttcttgtgcgatcttggcagaggagatcgtgccattctctataaaagcgtctttcaagaacgcttggttgttcttgattgcgaaagcaagggttgctgttccatttccggggttgtataccgcaaaattgtttgcactaaccatgaagtaggattgaacttggcccccagacccttccatccccagctggatacctgcaacatatttattccctgcggagtctacctgaatcttagctccccactgagcatctattttaccctcaagtgttgttacagctttagaggtattagatactgtagccctgagctcatcaatattacccatttcgtcaacaatttcttgttttgcagaggtaagttcttgacggatcgctgtggctgtattattaacaagatcaactgttgtactattagtttcttgaatagatgcttgcagattggcaacctctttctgcacatcatcttccagcttggtgatcttccctgtagctgccaccagatcctgcttaatagcttccgttgtcttatttagcagatcggttgttgccttgttggtttcttgaatagaggagttaagtttgctctcagtgttcttcaactcttcccgcagagtaccttgagttgcagttatttgctcactcaatgcttgagttttacgattaacaagatcaacggttgatctatttgttgtctcgattagtgacccaagcctaccagactctgctgcaagtttatcgtcaaaggattgctgagctgctaccagcttactgttaagggcagaaatttctccattaacccctgtaaatttttctgtcgtctctctgacaacaccctctattgtatccccaagctcttcaaaaatgctagtaacacggtcattgactgcaccaacatttttatccatttccttgactgcattatcaagattggcggtaagctctttataagtctctgtctttttgaactccgcatcaatctgtggcataagatcttctatggatgtgtaacagtgggctgcacactccacaaaagcagatgaaccaaaagcatttgttgtcctgatataccaataataaaccttatcgttctgcagaccttcagatgtccaagttgaaccaacacccatacgggtggcgtttgaagtaacggttgcatcactggtgtcgggcaaccttgtcataccggatgtccaaaagtcatactgggtgctaacacttgctaaatccctactatgcggaatcaaggtgatagcaaagtatccttgcttaacctctacagaaaccggagcttcaggtgcctgaatgttaaactcacagtacgcttctggagatacaccacctttataagatgttgcaaccacggttgctgtgtatgaccctttggtcaaaccttctactctgacaaactgctcaactgtctgtgctgtccaaacaatctctccgttctttcttacctgcacaatattttgagcgtaagtcccaacgttgtcccaggccaaaacaccgtgagttacttccccagcttggagaacggagtatctgaagttttgcggctgagctacaccggacggggatatcggaatatctacatcgccggaatccggaagttgccctgtggcatcattccactctttagcatcttgacgaagttttaccttgacaccaccctttttggtaaactcccattcaagaactctcatttcttggcccactataccaatacttgggaggtccattgtaacataacggccaggcttaaatttaaaacctcgcatattgcaggtgacttcaataatcctgccagctctagcacgtcttaggaagattgcagaaacacgctgagcttgataaggactggtaacaaagcgatagtctatatcgattatctttctttctccatccttctctatccactctgggacaaacactgatggaaaatctgtttcagaataccctttggtaggactggtgaatctgccagttattgtgttggatcttttgtcaaatgaggcttccggatagatcttgacctcaccacagacacaatcctcacttagtgtcattgttgccgggccatagtatgcaccaaccagcaaaccatacttaccagctacatagctgagatctgcaccacaagctttcagcatttctgccataatgcttgctggggcctcatccatgtcaaactcaccgttaatggtgtaacgtcgctcactggttccgtcagcgttttttaccgcctcgtcgcatatgttggcagcctccttgaaggactcccagttaatggtttcgtcaggacatttaaggtacgttcttaaatagtctaggatcaccaaggccgcgttattggtatacacctctttactgatacgaggatcatagcattttttaccaaccttgacaagtgtaacgtttggcaacccaaaaggaaacttgttagggtcaaacctgaagctggcacgtagccaactgatccctctacctatcatgtcaggtgaccatgatgggcagtgtgtacccatgaaaggatcagatgtttttctgtcgttatgtagctcccacgataccagatctccatacgaggaaataggattaccgtcgataagtatatcttctataccttccagagggtgattggcaagaacaatagcacaatggagggttctgtcgctatcctgctccaaaaacgcaagcaatccagatgtgcgtgtctttccatacactacagagcaaggtgcagcagaagatctgagaagcttttgtctatcttgctgacttctgtaagatttgttgccctcaaaaatcttatccagagttctggtggtaacagtgttcaggctgtcagccagagctgccttggatgcgttccagtcataacttgaagatcttgcagaagcaacgatgttatcaatcattgcaattggcattaatacctccagacatcaacaacgatagaatctttcatatcgaacataaagacccctttatcacctttcgcccaaatctggttgttccagaacacaccagcggtgagcccgttcagaccatcgaagataacaatatcgccacgctgaacctgtttaggagtatctagtcgagtcataaagagatcaaaaatagtaggcaggtgtgtggttttgaaacggagcatgcaccatcttttgctttccaactctgttttatacgttccttcgaagttagaaagaaaatctgttccgtattgggcatcaacacacttagctgcaaaggtgcagcaatcgtggaatccccattcaaaaggtatggtggcctcttcgtcaaacactttccacaatctttcttgccaatccactaaacgagggtgtgtgctcattaaacctcccaaatgatcgggcggctcgccacctgatccacatatttaaaaaatctgtcattatcgtttcttgagctgtggctttcctccgtgtaccgataaggaaaacctcttaaccaactgttgaagatggaagagatggatatggacaaagcactgttctcacctgtctgaatagccatatctgttataaggccgtcaaacaagccattagttgtaacaggcagaccattctccatagcggtaatatacaacgtggcacgacaaccagaatactccgtcttcagtagatcaccaacatacttaggatcaaacccgttcaatgttgctaccacagatccgaagttggtggcatctttctcagacacagcagttaatgttgctgatccacctatccctataaaatgttgcccctcaattactacaacaccagtgcctgagcacaccctgacagttcctgtcggtagctccagctttgcagcaattaagatctcaacaccatcaagctccagcttttcaagaaataaattatctaatggcgctctgatcatcttagaaatcctcaaagaaggtgataactatattatcacctttttgcatagcatcgactttttgcttaattttataaatatctctgatatgaaacctaccctttggggattgagttattatcttcatagtatcccctgcggcaataggttttctaagtcttggagatatgcttataacagcagacccaacaccatcgctgcgcactggagctgttaccactttcaactcatcattgacagatattttatccccagctctggctatgtctctgtttggctcccacccaaccgtcttcaaaaaatcgtcgttaccagtaggcccaagggcgattggctcattagctgtaactgagtgaccgtaagttttaataagaaagatgtttccatctttatacacctgatcaacaaagctcttaagctctagcaactgtgactcgctgatattggaaaccgtcaaagtgcctttccagttaggtgtggcataggttactttttgcgttttacctgtaaacggacttttaaacgtaacaatatctgccagcagctccaatctaatatctggaaggtatctaggcctttcccataaaaacattgtgcctccaggttaaacaatcatgatagttattttaccagattttaagttaatacgcaatacaaacaaaaagcccccgccgaagcgagggcaaaacagttacttcagtttctcttgcaacccagtaacaacctctgtcaattttttaacctgctcctcaagggcggttattttatcgtcctgttccctgcaaacctggacaagcaagcctgttacggctgcgtaatccacgctatagaatctttcctctgttatcaaaggagttccatcttgatcagagtttgggatttcctttctttgcacgaaagagctaactgcttccggcagcgcttcaagcacttcttgtgctataacacctgcataaggcataccgttctctttaagagtgtaagtataacccttcatcttccggatagcttctaacgcatcaggaataacagctatgttgtctttcaggtctctgtcagagctctgattgacagatgtgcaattcactgcaccgtttacagaaagatatcttgatttatccggcaaggtaccgcaatgccatacccaatttgcttgagactcgtcaagaaccttaaactctaacacgtttggacgagcccctgtgctgccgttaccccaataatgcatatgggcggcattagcaggcatgttgccaccgttattagtaacatggcttccagaaatatacacctttaactctggggtaggtatttccccttctggggttgttcctccatacctgaagctaacaccattaccacctgtttgggtccacggtccccaagtgaagacctgtttcaccatattcccataacgtgtaaatctatcgccatgataggtaatatactcttgaacacacccattaccattattggcgttattttgcaacacaataagtgttccggcctcatttacgggataatgacgatcatatgttgcatcattatttgcaggctgatggtaaataccttcccacaatccgtgataggtgttaaggtctgaagtaccaagaccctgacccctgtgttgcatagccttattccagggatggtgattaccaccttctatagacctggtatacaagttactttgtctgccagcaatctggaaagcgtagtttccagagaatcctacagataaaccgcctacaaccatggtatcttgtgggccgttaacattaccagctattatttttgacgggttgttaggcccaaactggttgttccagtctgcacccgtgtggcatacaaaaccaccaggagctgagaaagtgccatctttgttgaaattgtagaacttatgagctgtacctacaacatcgcgaacgataacttgaccagcttccggagtagatctgaactctgcctggccttgcagtcttgcaccattaccacatttagaggtaaaggtgttgttgatcagatcctctgttccttccgatgcagcttggaaccctgcgttagagaacagtgcttttctagtggtctgactgccaggacaaatgtagtcaataccgtctgcccatagctcgacttttggcatattcattttgctcatcacagcatagcgttcagcagtgcctatatagtgccactgtgtgccgccaccagtgtagaaccctgaagtccctttgaagtcaacaataggtctggtgttggtattattatctccaagaacagcaagattcaaatctgctgactggagaggtgcaacgaacttaacaccgtcctgattgtctgttacagagccaacctggtaatcttgctccctggtaaacacctcgacaacatttctacttgcgtatatgctgacagggaaagcacgcgcctctgcatagaaagcaacatattcttgtttaccccttgttggagcaaccatcccaagaagtgctttttcattctggtagaaatttactaccccgtagaaagagtctcctctgtttgtccaaccaccagttctatagtgacactgtaaggtcgcacagttcatagggtcatttccagatgaagacctggtgactatagtaatatctgtacctgtcgaaggggcgtaatacggatctgttctaacgatgattgggtagtatttcccatcttccatccctgcggttcttggcagtgttaagaagtcttttacacctgctgctataggaactttgaacagattctgagcgtctgctaaagttgtagccccagtgccacctgcggcttgaggtagaggttcccacttggccttccggttgttataaacaccccattcaagcgttccttcaccttgctcgtccataccgccatcccagacaaccatcttggcggctttcttggacccccagaaacctctttctgcccctgaactacggatccactctccaagtccccagtttgccagctgaccgttcagatcaccaacctgcatatatttaggacaatctaagaccccatcctcacggaagcctaaatagctatgagtttcagatccttttgcgcctttgtgcaggtggattgtcaaccaagccttattgtcgtttcttacctcagagtagatcctatacccatgctcaaggacaccgtcagcgccgtatttatccccatggagaatacctgatggagacttaacctcagaagtgctttgagataggtaaaggttcccgaaggtaggggtatttctagacccgagaccgatgtgcgatctaaaggtatcatcgttacgaggtctgaccatcggctgccatgcagtccactgatttgtgttggcctgataggttctcaaataccaaacatctacgttagagaatggatagtattcctgacgacaacctgtaccgccgttagcattgttctgccagacaatcaagtgaccagcaccagaacctgcagggtaaccatttgcctcagttgcataagcagtcatcggctggtagtatacaccatcctgattaccagtcaagttattgatattgaaatttggctcaagggctgcacgttgcttatagaaagcaccgatattgatacggaccccagcggcatctctagcccctgtgccgccttgctctatagcaagaggttgccacgaagctgtttgttggttccacataccccaacggcctgttgcatcaagctgcaagtaccctgccgtatttaaatcatctccagcacggataactgttcttgttgggttgtttgcctctaggcgtttaaattcatcacgaagtgctattcttttcgttgttgctacaccgttggttactgcaatggtgtacatggctccggtggtagcgccacggaaaataccatcaacagttgtagtatcacgacgagataccacaccgttcagaaatttttcaccagctgctacagaagggtagttggtagttcttccctcttcaataactgcagggccaacaaagttatcaaggtgaataacatcgcctacagtgtgcactgtaccaaaatctacacgctgtgcaagtgctttggcatcgttagctgtctgaacagtaacatccattacatcctggacagactgcccttcggctgtcatgatcatagatgcgccaatggtagattccagctcctcccttaaggacgggtcagtatataccatccatgcagcatcagtgatcccaccatcggagtacggtgaagacagtgcaggaacagtgtgcggaaattcgcctttccaacgtaggtagaggtcttcctcttcgaagtaggcaaaatccattgggccgtttaacttaccaccttccttaaaggagattacatgagaaacagtcccatccacatggacaacatcgccaatttttacacgacgggtcaggtctggttgttgaacaaccaggtaatcatcctctgtcactgcggtagtggcaggaagagattcaattctgacaactttaatatcagccattctttctcctgaaagggggcaaacagccccctatgttaaaggtacaatccacggtattgagcataaaggcccagaccgcgaaggatttcgccagagtgatagccaaccggatcagaaactgcccagcagccgtttaaaacattatccccattaatgaagtggtgcttttgcagtagcttcacacaggcttctacaacaatatctatttgaggtattgtctctgaatacccgcacagacctagccagcagcaacctgcaagccattcacctaccacccacatcctgtctcctctgtcctgataagaatatcccccagaggtgttaaagtctgtaggtagatttcctgaatgagatgactggaatctgttgaggaaccatgcccatttctggcagaacaggaacagtctttcatcaacaggttctttatgtttcttgagctcatatattgtgcggcacgcagcaacaaaagatcttgactggagcttagagttatctaccatctcccaccaaccagtcaacccttcattacctctctgccatacataacgtgaggcaactggaccctctgtcttaaatgtattattataccagacttgagcgtcatacagaaagcctattgtatttgacaatctatggcgatctatgttttctgcacccatgcagtagactgctgggtattgcatgcctgggtagggccaatttggcctttcctctaagagatagttttccttatctatcacctttccggcagggaacacacctggtgtgtgcctgtatgcaccttgcttgtagtttctgacatagcaatcaccaaccttagcggttgattctgtcttgcttgccatccatacgctaaaccagattagataagcatccctatctgcaatatagaattgcggcagtgtgttgacgcaatatagatcaaacaagccattacctatctgcctgtcgcttaggctgaaatctacagaggtgagtcccttaggattagcaaagaaaggtttaatctcttcttcagtgtgatgaggttgtgtcggatctagtttgaaatctcctagagtaagagtttctgttatccattgtccattagtggcatatagatcagcataccataaccacctgtctttgtcaagaaatttgacccttaccatctcatcatctgatcgataagttactgagtttaaagaaatctctcttccaaaattgaaagttactttgcctcttgctatattacaacgggtgaagttgtcagagtggttgtaaatgtcagtatcgtactgcatactaacactggcaccaccgctcacggcaatgttttcctctttaggtaagaggtacggattaccgtctttaccaactacctctacgaaatcagtaaccttggcaactatttctgttacctctgcccctccaaaaggaacccctatcctgtactgttttttgttattgttgccatcattaaggatgaaatgtggctggaacagaaccccttctcctccgaaattcataacaatttcagcatctctgcctattttgtatgtagtccctttttgaattatttcgcaaggctggcgtgcgttcattctaaaattgatatacccgtcactgtccctactcatgacaggaactgttcctgcaacaagacaagtaccatctgtgaacggtgccttaatcaacgtggtctttctaaacagtttgtcgtaggcgtttatgtcactgaaattaagcaacttgttgtaagactgtttaaacgcggtgtaatacttttcttcacctgtcaaggtgtagagttgataacaagcgtcacaccacatttcttccccgtccaactctggggcctgattatctgcaaccacgtttataggatttacaattacaggggatccagcaggtatcaccgatccaccctgctcttgaggtaatcttacacaataggtcaccttgtggcttcctgtaacacccttatcttgtaattggattgtgccgaactctatagacgtatgcccactgtcggctatgctcccgttatcccaatagcggttaccatcccatgctatgtaccactcaacccaccaacttaatccggatgttgtccaatctgggttagcatctgtgccaccgtaaacatcagagtctacagtgtttcttcctaacacaccgttatacgcttggaatgccttgtccaggtattccccccatgtcggagatccagctgggatttttcctctaccgttggtaaaagacactaccacatctttaaacccaccgtgtgatggaaccccatctgtggatagagggtagtgggacaatctttgcattttactttctacggcatatgcacccagaagatgactattgtaagcttcccaagcatcttttgccctatccagatagaaatcgcttttcgatgccctgtatgcttcaatgtatcccagaatcaacacagcttgggactcatgcattgcccaatcgttatttatcttattacctgcccaccctgcagctataagaccatcagggtttactagcttattttgtgtaggtgtgttggtaatacctgtgttgttatcgaggcacttcctgtgcccctcaatcatctgaaatacgttatcaatgttgtgttgaatacgcatcttagatagctcctgcgataatcagtgccccgtaccaagttaacccgttgtcgtaggtttccaacttgaaaatgtctgttgcaccagctgtaaatgttaggataggatctcttccgtaggaccatttaacattaccaggccaatagactttgttgccgccagaggtctgagtaatgcatacggttatagttctcgccaccccttcaagaccttctgtttgattttcaaaagagattgtggtatttgaagttagtcgaaccttaaaggtatccgcaacttcaagatccatatcaagctgaccaccgatagatccgtaatcaactattctgccagaagaagttgcagcaagctcaccaaaaacagaccaggcgtttgcagacacacccccagcaccctctacagtggagtctgggaggattattttaggataatccccgttccacgtgtagtagcgcttagtttctggatcataagcaaagtccttcttgctcttaagataaccaccctctgtgaaatagactattttagtaatgctgagatcgttgacaacatcatcaatcttagcctttcttgtcccatcagtctggttgacaaccaagaagtcatcactcaggactgtttctgcatcttcaagatctggaattggtattgtaggataagctacagccatgatttctccttagttaacatcaatagcacgaccagactggttggcaatagcctcatcattggaggtagcaataacaccagagtattcgcgctcatctggagcaagcgtccaggtattgcggttaatggtttgttctgcctcagtcatcagcagatctttatcctgagtcaacagagagcctacagggatcgggttttccatctcaggaccagcatactggttccaccatgtggcatctccggttctaggcaatctgaagttgatcaggtagtacagtttattagcccacttaatccaaccctcatcatcacagagagaggttgtcccagaatcaggttgtgggtaggtaaactgatcaagacctacgaaagccagccttacaatctcgttctctttggtaacaacctcaaagaacgcttggtatgttctcgatcttcgatccatggtagactggaagtttacgatgtttagcacatccggctcttgtcttgccacttccataatcttgttatcaagaacagtcttcatgaccttcttactgagaaagtccatataagggaagccaaacaactcgtcaaagtaccagctccccttccacgtattaaacctcatccacaagcgctggcgcagacttacctggtttgaatctatcaactcaagacctttgtctatcgccaaatcgcctgtctgtgggtccatcaatatatcactataaagcgtagccatgaaagccctctattagtgcggtccacttgtctcgccatcagggcaagagtgggtatgacctttatattctgcatagaatgaatccaaatccacaccagcagcagttataattctaccagatgggtctattgtggcaccattcattctgatatttccatccacagcagctcgcaaattggcagccccgttagtaaaagagaactccccgctgctgtcgcaccgtagtgttccacccggtgtctgaagctcaaaatcgccagaaggtgtcagtttaaaataaaccctatcattccataactctacgttatcaggatcgatctgtaaagcgtttgagtctgaatgaacggaggtgattgcccaccctggaaacaggccgtgagtttgttgatcgtcgttattgttttcattcctctctgaaaactgcaatcctacaacatctccggccttaataggaagtgttaaccttgcctttccgctgtttgcagacattacctgaattggaacgtcatagataagagggtatctctccacatctccgtcatcaaacgtggtttcagctattggctgcacggctgcagaagggatactgtagtctacactgacaactctggccctgatactggtgtggtagtccctcattattttttctataaaggatcttacagcagcatctttcctatttattgccattatacctcctcagttttgtcaacaactccacccactgtttccccaaggccaagctctgtagtgtaatcaccaccttctatggtgcccttatgatgtaccgtgatcaccttatagaagcctgtatattgcttgcttttaagataaatagtggactctgggaggatagctccgttaaggcatgtggttacagtaaggccaacatcctctctcgggtttttctttttctttttagatgtcgaaccacctttggcagcagctttagcttttcgttttttagcaggttctgggtttttaggggtaggagatccgtgcatcccagactctgcacttatttcaaacacagagtctttgaaccttttcccaaccttggtccaatacaaagccccatcctgaacgctaaatgttgagttggtcagccttgcaaacctgcggaggttctctgcagtgtttccagagaaagccatagagtattgtagagtctggtttccaaaacccacaaccctaccttttggcaagttcatatccttcagtaggtcattaagcacagagttcagaggtgtgcctttctgataagatcttgtgctttggcacttaatgatgttctcagtgccatccccaaagatgaacttagtttttctggtcggaccttcccacctgtcttcaacaaactccacagttccggagaatatcaactggttctcattatcatagccagcttcaaacataactgcaagggcatcagcctgatgcatatccagatagttaactgtatcgtcagacaggttgtaaactgtcacataacctttgtttggctctttggtattgtccttttgtatgtcaaactctatattggcagcaccagtgtctgagctaacttcataaactccggaatcactctcccctttcttttcaacagattttgggatattggtttttgatttaccgccatgttctacaggacgaccaaacaataatcgccatgttctacgtctgtactctgccattattctaacccttgctgttccttgtaaagatcaaccggggtgccgtatacaagttgtagctcagatctcgccccaaggttatatcttccaaccctaccccaatattgatcgtctttaaacgacagcgccatcagtctacctttcggtaaatcatctctgtaatgcagtccgtctaaaatatcttgacaagctgttacttttctggttactaaagggctgtcacctactggaccaagagataaccaccaggactcatccctctcattccattgcatacgcatttcatacgtttcattgtctaaaacaacacgcatggtttgatcaggaaagccgtcaatgtcccacacaaaggtgattatgcaccaatctttaagctccattatacgctccccttatttcccgttaactttgttgtagttcccctgctcagatgggactatggtagaaggtcttccatattcctgataataccaatccgcagccgattgggtaacaccgttttcatctgtccacatcatggatttgtatggctgccactcctctgcagcatttgtggatgcagtgtctgcgaatgctcctgtgtccctcttgttacctacgttactaccattcttacagtcgttgacagcacctttttgctgggttttgcctactttcttaggattgctgtatacagttgcattaacaaccttattcaagtagaatgtgcggaactctgtaagttctacatcaaacaccattgcagcgccttcaccaacagacttgttggcagaaagactggttatgatgtagttctcaagaagtctctcctcggtaaccaaagaaaccaactgtcgtttattgataatctcagtcaaagcctccaatgcagcgcctggtcgcatagatgctgcagggtttttagagtcagtattcctgtcgatgtagttttgctcatagattatgtgtggggacgtatttaccctaccagtaaaagaaaacacaccatctttaattacagcgtggtctgacagggtagatttatcttccaccgcaaacccagtcttatcaacagaatgtttgaaagagtaattctcaacctgatcgaagataatggcaagatcgttagtaaagtttttacccttcatctccgtattgcgaccaccatagttaagaccgctgacaaacatagtgtactttacatcgctttcagtttgctgctctgccttttcagcctttggagatttaacctcttgaggcttgtacaggtctttttcatcaactatattgcttggcataacctctccaggacactccgataccatctagatattgtatcataaaatagccgtttttacaacaccgataaaataaagggggccggagccccctgcacagtttattaccaaaggtcggtagacatgaagttgatatctttattgttctcccactcaagttttgcatcaaatattttgttaaactcaccctcatctattgaaatcgtgattttcccatcactgatctctaaaggtagcatttccatagttcttaattgagaagcaaaaccaggaccacctggcaacggaagagtcccgcccggtaaggtgtccaaaggattgacaaacccgttaccacccgatatgatatctttgcgaatcatatcgctgatagtatccaactgctgatttctttcacttagtgggttgaaacggtcattaaataattccccggcactcagtattgtaccgataatgcccagcttaccgagaagaccaactttgccaccaggtgtcttgaggccacctcccccttttcctgccggagcgccaccaccaccagatccttctgtagtagctgcacctgctactccagccgccccccttagagagctaaggaatttaaaggtttttacaagcatggatgccatgacaaaaccttttgttagggcgttcactaccagcatgatggcagcagcaaaccctgcccatttagcatagctaaaggtgtcatgaagctcttcagaatattccttcgtcttagctgttatgaatccccatttgattccccattcaaggaaaaacatacggatcttgactatagtgttgtttagttcaccaactacccagttaagacctctcacaaacccgctaacaaaatcaccagatgcatcccacacaaattgcagagtctcaccagtgcggatcagtgtataatagaactctgttagttcgtcagaccaacgggtgaacagtttctgacgagtcagttcgatgaaggttttcagtctgttttctgccagcacgttagacttctgcattctttcataaccagctgcagatgcctcgttcatgtacttagccacatacttcatgatcttggctgttttaacctcacctttcttcatcatgtccatgaactgatccatggagagttcagaaagaccaaaagcctctttggtagccttgataaaaggttcgtatgcaccaggtaatgcttcagcaagttgttgcttcagttcttcggacattacttgccctttaccgagcatctgttggattgccataataccgcgctggtattttacctcatcagcaccataagcagcagcatactgggagtatgcagaaaacagctcatgcacttcctgatttgtcatctggtttttggcgtttaccgacatctgggcgtaaccttgaagaccagatttgagatcaaaaccaagacgcatagcctcttgctggacaaacgcaacctcactgttggctttgtttggatctccagtaacagcagtaagagcagcacttgccccctccatcatgtgaccggatctgttaaccgcagcaaatccagaaaaagctgtatacgcagctgttgcattaataacagatctacgtaagtctctcatggcatcgcctagtgtaagcgtttggctggtggcacttttaaatccagactgcagcgctgacaggtgggcgttaaaggttgactttttcatctccccgcgagcaaacctagactctaactctgagtatcctggcaagcttccacggaatccggccccatacttggcagaaagtcttatcgcggagttgtagaggtgggttcttcttgcctcacgatccgacataagcctattatccataccagctttactgtctcttcttagctgtctatgataacgattcatagcggctgtctgagctttcacaaggttagggtcggaagccacaccacccatattagggttaccggggatatatttgaaagatttggcattagccaaaactcttgccttaggtgccttataaccaccgtaagacactggtgcagatttggcagcctttttggcctctttagcttgctgctggtagaacttacgcatcctagccatttctggatttttagcggtaagattacctacagcttgtttacgtctcgcattctccctacgttctattgcagcccttactgcagcctctttcttggcctgcgctacgctctccctatgcagcttagcatttgcctgagattgctgtctggcaacccgctgcattgtctgctgggttttaacagctaccgcctgccatctactcatggggttggctgagttaaaatcttcgcccagtttcctgaactctctcccaatactgcgaattttctctacagcttttttgtaggaggagttctctatctcaaagccaatcttgttgactgttgtggcaactattttgtttgtagccatggtttcctcataataaaaagggccagatcccagaaaaggaatccggcccttagattatcctctcctgcgcttagctttcgcagcagctgcggcagccttctgctcccgctccatttccctgttttggacggtatctaggaattcttcgatatcaagatactcacagagcttcaagaaatacgccatatctgcaagatttagcgattcaaaattttcccctttgaaattcttgagcaccctgcaccaaagaaagtcgaaccagttaagtgaactgttcttagctgcccactcactggccctcacaacaaccttgcttattcctgctcttccggagtctgatccaggttgttcacctgctgaatcatacccatctgctgtaacatctccagaaggcttcctaaaccgtcttgtgtgaaaaaacagccgtagttaacctccagaaccttacctgccagcttaatcatctccagcagatgccctgcaaacacaacatccgggttaagcttatccacaccatctacggtaatatcttcgaacaagattttaaatagctcttcaatagagttatcatcaagttcttggaacaggtaagccagagcagtaggaaggacctctgccatgttctgaccgcctgagataatagatccaccgatagcacctagcgggacagccacaatcttaccgattttaggcatgtttttcattgctttcatcggtccccagtgggtgatcacaaagttgtgccctgctaaatcaatctctgttgtaggtctaaagtttatagccattttatagcatccttattagtcatgttgtgcaccatatttgtgtattttaccatgattatggtgcattgtcaatttaacctttcaagcaattcaagaacgtgtgtcaaaaccataaaagcaaaaagccccacccgaaggtgaggcttatgctaaagtgtgcccttagataatacctgcaagacctgcgaggccagtaagagcaccagtgatgttatcacggttgagccatgcatccagaataccgatatcccagtccagttgacctacttcggttccgtaagtcaggtcaggctgtttctggatccaaccgattgtagaaataccagggccctggctaccttccagcagaaccgggaagaataccaggccagtaatcgatgcctgtttctgccagtcagaaaggtaagcgttccatacagaagtgttctgcaaagatacagtcataacaccagattggttacgagacagggccgcagacatttctccatccacaccaaagtgagggtagatgttgtcttcgtttcttgaaacaacgatcttggtgtcagcagcgaagccagtgacacgctgctgcatcaggtacagtttgacctttttagggtcataagcataaggagttaaaatttgagtttccatctagtcttccttattcagtcattgcaacagcattggtggatttagaaccaactttgtcaagaaggacgttgatccggatacgaacgaagtgcagggcgttgttatacaccagttctactttcacaccttccagaacacgagcagctaactgattggttgggatttctgcacgtttaggaactgtgatgatcgggtcgtagaatacattattgtcttcgtcgaaacctgtcaggatcgcaccattcttaatgccagtgttgatcgggttgttcatcagaacagacttgataaccggaagatcatcatcagacatcttcatgcttaaacccatgttagagcggcgatgcatgtacccaaacatagattcttcagatctgaacttgatccagtgtgcaaaacgaatagcgtctgcatactgacctgaagcacacttaccttcccagaaagcgccaacaccgttaatcattctgtagaagttaacgtggttttcccaaatagccatacgctgagttaaagtcagagatggtgcaatcacaccaggcatctgttttaaatgcaagctgtcgccataggacggatcgttagatgccatagcgcctatgataccaccctctggaaaatctttatcagcacgagggtcgtacatgccaacactgtcatattgtgcagccatcagtttggtggcgatgttattatctttaccagtcacatcttctgcagtagagtagacatgcagtttgtagttagcctgagcccacttagcacatgcttcaatatctgtgtggtcttcatggcacaggaagtaccaattatcccgctcagcattgatcttgtcgatcacggtagaaggtttttcagcattggcgatatttttgattgtatagttaccagtgtgataaccaacagtacagtcaccagtgatggtgataacaccatcggcagcctctacagtgatatcgtccaagttatcatctgcttcgatcttagtcttcattgactctgcaatctgagttgcacctgttccaccagagataggtactatcaaagaagtattgtagctaccttttgcaatagtcattacgacatcggtatcggctgcggcagcaatacctttaaaatctacagtggttttttctttagcctgtctgccgatcataacatattgtggagggaatacaccaccaaaagcttttgctgcaaactcatacgctgcagagccttgtgcgaaaccatcttccaccatctgatccagctcagcatatacgcgagctctctcagtaaagttgttgtggatagcgatgaacaggggagtttcgaaacctacagtgtcaataggctgggttccgaggttaactgtaacatctaccactttatctaaatatggcatttgtttcctcttaatatctgtgcacggatatcaaacacgcagtgtaatcattacactacacaattataacgattactgaccactgtctgtaaccgctttaccagaattgggtgaagggaagtgtgtggttatttcagccttaattccctgaagatcctcaaaagccccaatgtctgtttcaacaaaccttacgttaaatgtcagcattacagtggctctattttcatacgtctgcttattcaacggcactctttgaggtgagattgttgaattgttagagtaggcaaagcacgatcctagagggaaatacttgtcataaaacattggaaggtttattgcttgcaatactctgctaagtgcaacatatgccctgccacgataagctgttaacagataagtaacagtgtagctgtgggtgacgtaagcattaccctccgcatcttgaaactcattatcttcccaagtggtgggattgatcgccaaggtttgtaaaagtacaaactcaccttccggcttcggtatggtggagctttctgccagaactacagttcttcctgtggcaaccttgacgagcttagcaatggttgtttcaagatcagaaaaaactttttcgaaagcttccatcagttctctccttcaggctcttctaccacaaaaaatctatatctcccaccaccagaggtaacatatgcatcgcattttaaaacggtaaaccatttcaagtcaccacggatgtcaggtagctgaatttggtcagccattgcatatgttccttcgtccggactatacaacttggttgaggagtaaactgtaaaagcctcgtactgtctgtcaccttcagggtttatttgagaggagtaatctttagctgcccttcctgtcaacggctgcacaacacactctaagacatcaaactcttcatactcaagctctaacccctcgttgacaaaaggaccaccaactgttttgttatacactctgtggcgacctttgaatgttttacgaggtatcagtctgttctttcctatcagcttataacctgctgccactcaaccccccttattttttactgtccgattttaaaggttgcagattcaagcagcacatcgtaatgccgcatagcctcgttgaagcccttttcttgtgcccactgctcactaacagtaggattactaaactgaccagcctcaataacaaactggatagctttggcccctgtgtcccccatctgcttaagaatagcctctgcacttgaccctctagccatagctctcaacaatttttctgtcaaggtctgtagttgagtgctgtgaaatgcaaaggctgtctccatgaaattgcgaacaggcagcccgttccaaccgaagttgtgaatagctgccaatgttgccatatttaagcctgacgggtgaggttcgtcataaaagccgtaggttattgttttactttcaagtctcacaagttctttgtagaagcgatctaaacgctttaggttgaaccttgtttgacatttaacctttagcattatatccctcactaatgtattttaccacaaagatacatcaaaagcaacaatttttaaaaactgcgtttgcgccttgggtggcgaggaggttggttatttagaccactgataggtgtaataccctggacatcgaacggtccgttgctgttttcattaaatttaacccgaattccttcgtctacacgaacaccaccaatgataatcattctgctgtaagcatctagctcagaatctacatagtcggggtgtgccagcagccaatcaaggaaatctttccattgagcgtaggaagatccaccacgaatctctatagtctcatcacctattttttccagacgggaagttatacttgcattaccgctggacacttcctgcatcatcagccaccgcacaagttgcacaagcacattgtacttaagcagaggtagcttatcaggatctgccggataatttagtttcaacttctccatgtcaaggaatgttttaattacctcatcagggagagtttcctcatcaacattgccgagcaacaacctcataatattaataagagattggtctggatcaggttccggaagtacaggatcttcttttggtggttcttctggggtatcgactacaccatcatggttaggcggtgacgggataatctcttcatcttcataccatgccatttgaaaatacctcgtaaaaataaagccccattcctgatttggaaggggccttaacaaaattatgccagtgcagcctcaaaatctttcatcatattttggaaagtttttgccttacttaaggtaacaccgtactctttagcgaaggtttggagtgcatcttttgaaccacttttgtcatcttcgttgttaagagctgcggcctgtttaaggatttcatccttattctcaatggctaaaaatgaggaagaggatacagtcacatcttgcggatctgctacagtaacttcaccgtcaccaccaggttcagtaggacctacaggcggctccggctctggttcaggcggtggagctatcgtagaaaccagtccaagatttacaacctgagaacgtttcttaggccactcaatggtgaaagtttgggtatcttcttcataaacaatgttgcattgctcatcgtttatggtcacttttttaggcatccctacagggtcccatagatgcccctctgccacggaaacttggaaagcagcatctacctctttaaacactgacggggtgagggtgatattgacatccccgctttgcagtgttaaagtgctttcatcaaggttctctgtgaagaacagaagaataacacccatacggatagttgaaataccagtatcaattggcaggcctgtatgttttgcaatcttctcaaagaagtctacaatcgttctacatggatagtgaacactgccaataacgaattctgttggtggcagcagggctgataaaccaacattgatttctgggttatattgtgctaaaaattgataaaaacttaactgattgttgaaaactcttaatagcggatcatactcaactggatatacggctctcttcacgggacactcctgttaaaccctaataaataaaaaggggagggggagaaccccctccccatatgggatgaatcacatcagtgattagtcaccagctttcagagttactttaacaaccagctctgggcgggtgttaactgccagcatagaagtttcagattcaatcttctcttcacgcaggtatgcagagtgtttataccacatatacagttcctgtgctggagtgtttgcttcgttaacatcgtctgccggagcaaagtgcagttggaacatctgatcaatacccatcggcagaatgcgagcttctttcttaggaatattgccagagatatcttcgataaaggtgatacctttatgttcgaacacacgataaacgctgtcctgaccgccagcacccagacgacgacgcagaggttcctgagcagaaccgtagtaggtgtatgccagttctaccagcgggtgatgggtaatagcactgaagaactctggtgagcacagggctacaatacgatagccagctgcattatcgccagcttgcagcgcgatgtgcagacgagcttcttccagaacctccataggatcctgatctgcttttgcagggtcgatctcaacagatttctgagacacaccccatagagtgtagtaatcatactggcaggtagcgtcaccaggtgcataggatttacccagaatagcctggaacagagctttctcacgcagtgcttcatgagaaacacggatacgacgaacaacgcgggttactacgtcctgaacagttttcggagcatcaggagtgaagtaacgacggaagttctgaacatctgcggcagtgatgcctttgtccagagggaagaacgggatgttcaggtttttaacctgagcacgttcactaccaacgtagttacgctcaccaccacgacggcgtgccggaatgtcggttacaacttcatcaacacgctcgatctgagcaattgttgaggtgccgagacgagtttcgaacagatccataccggtaatcaggcgaaattgacgcggaacaaggtccagggtagcacctaaatcgacaatgccaaattcatctttacgagtaatcatttatttctccaaagtaaaacttaaatattttcccgaacaatttagggcttattattcaacaagagtctggacgtgaactttgttacctaaagcttccaacttatccagaattctttggtctgctttagctccatctgcacctaacagcatgtcttttgcaaaggtaacaccatggacggcaacaaccaggttataggattgacctacttctaaaggttttgcaagatgaaccgtaccagcatctttgacaagagcacggtcaacaagaacgccgtacacatcagaaccgtctgcgttagcgatggtacctgtttttgttacaacagtgccagcgtggtgatgctctgtcagtgttaccttaatctctttaaaattgtagccagcatcgctagaatcaactttgccgagcacgatatcagaatattgagcggtaatcatttatttcccccgttaatgtcttatttgttagattctgcacgtgcacgagcaagtgcttttgcaacgttttcagcaagaatttcttctgcggattttgcaatatcatccacaacaggttcgccatcattaccatgttcagtggtggcaaactcttctttagttttatgcacctctgcttccagctcttcaatttttgcttgagctttctccagcatagctacgataggttcgttagctttttccagcatgaagtcaactagggttgcgtgatcttcttcaccaacaaagcttaaagcttgagccttagtcagcattttagctttttcaacttcaacctgggccttgatgatttcttcagctttactctgggttgctttcagctcttctacttgcttcagcagatccagatactctttagttttggttacgtccaccggattctcctcggtatttgcggattttgcaacatcatccacctcggtagttttatccacctcagcaggttcctgtaccgccttgatcaggttcccttctttatcgaagagatcagcggttacttgttcaaaaatctgttgtgtttttaacaggctgtactgatctaccacactaagctgcttgccttcttttgcagccttatgaatggtcacgttatcacaacgctcttccagccatgcaatacaagactctgcgtcagcttgcgcccattcccaatcaggatgctctttagcccaagcctcctcttcaatctcaaaaccaagcatgtgtgcaagtgctttagcatcatcataccacatatcgaagaaacgacgcaggtattcttcaaaactaagctccacagtaacttggcgaagtgccttaacaatatcgtctgttaactgctcaggcttaagatcactcttcatcaaaagagatacaggtctattgttagcgctatagccttgcgccttgtggcacagggcaatccccttctctttaatagtaatcgttttttcagacattattcattgccctcttctacaacactgatcccgaagtttacgttggtaatttcaccagtttcttcatcaacattacctgttgcctgaatgcttaggccaccaacaatgccagccttcttagcttcccatagttcaggattattgtatttaactttagcaacccaagagccagccttgatgacctgctcagtgccaattactacaacatcaaactcttcttgaatccacgttttttcaatggtgaaagcatctgtagaggtcaagtggaaaaggttctcagaaactaggcctgcggcgtatgctgcgtcccagttatctttagcctttttgatggtgtctttactcatccactcaccgtgagcatctttagtgtcaggctcgtagatgatttcgtaggaaatcatttcttcctgtggcatattattccccatgtggattattttatcacgccaaaggaggttttgcaaccccctgtgttgataatttttaattttccatgttggatatggaattatctctggttgatgacatcttagaagtgccgttaccagtggatcctgcagccattccatcaccagccctgctgatgtcctggcccaagagcttcatcagctcttcctgatccatgtcctcgtcaaatctttcatcaaacccgcctacttcaagaatcttattaattactgcaggagtttttggcaagtaacctacagcaccgatcctctggacaaacttggagaagctctccatatccacttcttcaatcagaccaggtttcagtttaggcatatcatcatcttcaaggatgataccattcaatgccagaagctgtggaataagatctttattgaaggcctcagtgataatatctatatcacgctgaacaaaatgaccatggatagactgttttgactcagacagagagaaagatccaacgttatcgttaccgaggttaataaagccagcaccgaaacggtcaagaatcgccttcttacgggcatcgatcaaatctttagtggaatattgcttacccataccgtcaacccccttcagggtcatggagtaaagctctttaccagacttatctctatcagacggaagtataaagaaactttgctcaccactatgggcgtttgctgcgtcaagcataaggtctgcaaccattctcccttccattgaattcgggtcaatgctggccttgttcaaaatattggaaggaattttcagctcaagcacaccaccaaggtctttggaacagccaacaacctcaaggttttcaatcagaactttctcacggaaagatctgtagcaacctatcatcggtgacacacctgcagggttagattctgttcctgacagggtcatgagcataagctttttagcagggatgaaaatttcaggctcattaaagccttttgaaggcattgcagcaagaggtccagcccagcgtgcattctgagtgtttagaaatgcattaggtgactgataaatacctgtcagtgttctactattcttgtcaaagacaaacggctctgatctggacaaactggcctgaggtcggaatgcaattttatcaataagaagcatcccggcatatttaccttctttctctctgcggtatactttctcaaacagtgaaaaaccatactcgttaaaggtagctgcgcttcttgcaatatctcgaagagtttgttggtttgccaaattacgcaaagaatactctataagctcggcagctttcttagagtcttcacttttaacattataaaggatcttaaaatcattaaatgctttcgtgatgaaaacatattttgtatctaaggcagtagcaactgtggaatcacatttcatagtctccactgtagcaatcagctgaggccaacgcaattcctcaaccatcatagattgcgattctgccataatttgggaaagtgcgccagaaccgatctcactcatacgaacattatgagttggtgcgcctgcgttcccagatttattcacagttttggctgtggcgttgtgtttcctgcggttctttttggacacaagctttacccctcaaaacagtataacaaaatagccctcgtgttagagggctagtatctccgattactctattctaccacatctaattaagattggcaacacttagataaaacgcttgaacatagaaggtgatgagattgatggaatcacacaaggaagtgctacctcctctttctccaggaaattaatcgcagaagctacacagtctgcccagtcgtcttttctgttaaatgttgatctttccccgttgaatttttcaagttcagtcagaaatgcttccagagtatcaggatggaaactggattttacaattctcaccattccttgttgggcaagattggcaaaaggtgagaaccttgtcagtttagatttgttggaaggcattgggtcttcttcaaccctaaacccttcggcgagcagggatctggaggaggttaagaactcactcttacctgcctgccctgggtccacagagaagacgattatgcaatcatcaccatcgaactgcgcctgtttcctgatgatcacatctcgttcaccagcctttttacagaacttgccttccaatcctgtggaatacctcccgtcatccacgttctcaggacaataatcacctgacaggtaataaaagccgtcgctatctttacttaccttaatactggcagtaaagtcaggaaatttattaccggaagttctctcggttcctgccttatcccatgccctgcaagatactgatccaaggggtactctatcggcatcacgaaggaaagatctttgaaaatagtttgcaccctcaggctttgcaaaccagttaccatggagaagctgagctttttccagctctggtagaccttcgaggaaagcaaggtattctgggttgtctctcaaacagacaggattatcgaatccttatattcaaaggtggtcgcaacaccaccctccgcaccattacgtgccgctgcatgttaccatgcagagtagactatatcaccacccatctcagggtgcttcgcttttcgagcgccataggcttgcgccctactccctctcgggatagtcgttgaactacattaccaatcgtaattgtttgaaatataggtgtaagtcttacggtcttttattcctttaacaacactaaaacttacgccccacttcttagctattttatttacacacaaaaccctatcactaagatcctcgcagatacctattatcttgtgctcacttatcctattagaggttggcacttttctaaagttaaactctttagaaatatctgggtatactgagccattctttataccacttacaagtggttgattgacaccaaacatttcacaaatgtcttttacccttgcaccttgctctaacagtctacatatttcaagagcagtggcatcatctagggacctgtatttattgacatagtcctttttaagtcccatttcatgagcatgatgtgtgttttcctcaggtgttgtccactcaaggttccatgcggcgttattcaacttattgccatcaaggtgatttacttgagttttcacgctgggattatcattatcaacaaaagtcatagcaatcactctgtgaacgagcacttggaactttttaccgtcctcgcacaaagttaccatagcatagccagtctttttctgcacattaggatggaggaatttattagaatacagactgtaaattctgccatcgtatgtagcacaataatgattgtagcctaaaaagcctaaatttttcatttcaaacatctccctactacaggttcggaagggtaattatagctgctgattgtccgtttagcaatcggattttccagcaattaacgaagttattcgacgtgcatttctgcacgaagccactatcatttaatggttgcgcctatgaacgagaatgacaacggtcttggcttgatctctacgccaagtccgttaaccgtggtgtatttctctatcaactcttctttagaatctccccatataaattcaccgtcgcgtcggataaaatatcttttcttaccgcatttctccggatctggatacccttcatcgtccaaccaccatctaaccagtttggcaagcatgtgttctgaatctgggttacagctgataaccattcttgatggatactttgactgagatcgcagacgagacatcagatagtctatctgctcccattcgaattgtgtcgtctatgttcgggcaaggtcgctagtcttgccccgccatttttcaggcagctgcatgtctccatgcagaccagactatatcttataagcgacaacaaccgcttaccctcccgtttcgaatcgcttgattctacgtctttcgactagtcgttgaacgttcatcctctcggatgcttcgctgcggattatctaaattaacacactgttaccataccttcgatctctcttcgaagcctctatcatgttaccatgacaggttggtggtgtcaataataaagatttccccgcaattagggaggttttacgagagctacaaattaaccctcatcgaagcaaaccatggtgtactcaagcccttgatggttaagcttatcttgtacatactccatgtggcagtattttacaacagctccctttttgcttctatcccacttaccagtgttaggatcaaaccgtggaaaaatgaacttatgatccttctctctgaactttggcttaatgttttcaggcagatcactataaatagctactgctttaggccatagtccaccctcaccctccaactgtggagttgttcttcggaacataaccacagagctgtgggggtcatcaataattttaagcggcatcaactgcaaaaggaacgacttgccagaccctgcggcaccgccgattaccaaaatatctgcatcgttttcgaggatcatcttctgcttttcagaacacggtccgtaaatcttagacattaacctctctcctttggaaacagtgttctaatatagtcttgcaaaatgatcaatttagctctatcattgctacaagacagattattatccctcataatgccagaattcaccgcatctggcgcacctttctttaaaggtatagctttagcaggtggtttcatggcaccttccgggggtttaacaatcaaccttcctacatctggagggtcaatcttgtattctttctcaacactggttgcacacccacataataacaagcacgcaataaacagtgtagcaactctcatcgatcctcctgattgatactctcattataaatatctataagctgatcagggagtgttgacttcttaccttcaggtgattggaggtagataatctgcttttctttacctgccttctcagccatgtttaatttatcctgtaggtcagaaagagatttttcaaggtttttaacctcctctgcgtggcccattttaattttgtcggcctgcttttgttgctgatcaaggatccgttcccactttaactctgttgctgacacaccctcttggtaggcatcattaagcttagagttaaaccaatacacggccccaagataagctgtacctatagccgctgcaaaaactaaaccttttatgatccctctatacctactcagccatgttaaacctgaaatcattttaaggctccagaaacgaaaaaaccccgcagctatacagctaacggggcgggttaaaattgagtaacctaaatagatcgaaactaactaaaaggagactaatacttatcgaggcactcggtggatgattctaacagtaactgcattttcattcatcaagtatgcatctacatctctgtaaatataaaacttctgctcactatcaacaacacaagctactgccccttcagagttgtcttcaaaaaagaccaccactgcatcgcagctgagttcatgatatgactctcgaagatttacagccagaggattgaaatcgtcacgaaaatctacggtatgggttggatttacacgctctacaattttaagtgtatacattttaaaggttccttttgtttgtatatgtttaaagtataactgaaagtggtctccacggagtgattcgaacactcgacctcctgatcccaaatcaggcgctctaccaagctgagctacgcggagtatttactatttggtggccctgggtggaattgaaccaccgtctggcgattatgagtcgcttgcttgaaccttccagctacagggccttggtgctgatggcaggactttaacctacaacctattgattacaaatcaattgcactaccgattttgctacatcagcaaaaaggtgctaggtgatggaatcgaaccacctatgtattcaacgactacctcgtctattttcaggattaaaaatcctcgcccttgccaaagggcttacctagctcagtatgttgaccatgttgctagtcggcgatgacgactgtaacatttgataatccggttctgcttccgactttcgcttaattacaaggtcaacaatgtggcggagagtaatggaatcgaaccatcatcgagtcatcctcaacgggacggttttcaagaccgcttgagcaccattgctccctaccctcctttataaataatactgataatgacactgattttcgagcagttagtgactagtataaacgacgataaatatcaatgccattatctgtattatttatgcatctaaaaatataaatttggtggggagtggtggagtcgaaccacccgagtcgcaatgacaatagatttacagtctacaccgctacctctacgggataactccccaatttggcaccccgtactggactcgaaccagtgtcaacggcttagaaggccgctgctttatccactaagctaacagggcactgggtggctttcttttacaccttagccgccagaaaaggtgggagaccatgtttacaatattacactgttaagcaaagtttgtcaagaaaatattttaactattgccaacaggctgtatttctgtggtgaatggcataaaaggtgctggtttttcagcctcttctactaccacctcttcctcttcaccaaacatctcatcatattcttcctgcattcggtctgccttatcaagaacatactctgcaatgctttgacgaatattttgtttggttttcgggtccaacatcagctctcttaaaactttgtgagcttctggaaccatcgctataaaagattccttcatatcaaggatgttcttctctagctgaatggcgttggactcctctttcagaggtctgcctctacggcgacgctttttagttgtatccgccatgtttcctccattatcacgtgataggtggattttatcatagcaaatactgattgtcaagttcgccgcagggtggtattccctgcgacttgtccagcgtcctggaccagcaagacccaacaagtgggttaccagagcccattaccgcactttggctcgaccttattacaggttggctggggtcacatcgtcatgtgctggctgcccctaccattttaagtgtggtacactatcaagccctctaaggggaactcagccttctccgaaccctgtttcaaagcatccggagataaagccatcaaattcatctttaaattggatattcatcatgatacacgaaaacaacctcattgtaaagcacaaataaataaaacatacttaatttgtttgttatcaggctcagggtagaagtagaagatcttgctatcaccgatctgaacaccaccatcccaacagcatagcccataacccgtattcatacaagctaagtcgttggcaaaatctattgcatcatccagtgcacgaaattcaccttcatcttctaaataatcctcattcatggaacgaaaaacgagcttaaccttaaacatagcattacctgtagacctcgtaagttaaaattgcatcacatcatattgcagatcttatcaggtaacactatttttgtcaacagattccggccttatacttcctgtctgcgtattctttaatcgcaacctcatctgcattagtgaccaggtcttcaaagtaaccctcaagctcctcgtcaatgtcaggagaccagctctttttcctgtcagtgtgaattgcagacttgttgaacttattacagttctttgctaccgggttgttcattaagcgctcctcagcgttcatagtaaatcttatttaacattacctcatcctttgcagaaaggatatcaagatatgcatcaccaaatcttcctgcaacaacctctgcatgatacatcacttcgttaacatcgtcaagagtgataaccggatgaccatatctttctgaatattgtctcagggtgcgatgtaacgagtcgtcatcatatgcagactttttaatatcacaaacacgacgaatagccttgatgtcgaaaaaacctgtgcgataccacccaagaaaaaggtttcgtgcagtgtcaacatctacattgataccatcaagaaccttatctacaagatagctgtcatcctttggaccagcgtccttagtgcgaatgtagttgccatcttttccaggcgacatctccttctcatccccaacctgcatgccatcatttggcggtgttagccacttatccggatgcttacgatcacgagcgttagaatgattacgctggaaaccgggcttccacttgaaagttttctccatctgttcttcattctgataacgttttgcaatcttttcacggtcatctttgcgtgaacccatagctgcctcctcttcaagttatagaaaaactcactgtatcgctttgtaacgagcttttctatcaaactggtgcgattgcattacctggtatagtttatatagttgtggagcgatttaggggccttcttgtcagtttccacacataaacttcatccaagctcgcgcgggagactctcaaccgactccttacggcgctggcaagctttcgtcggtggtccacatcagtgctcggcctttggcctgcgctatcgcttcgctcccacacatgttaacagacctgcatgtatgaacttctgttattgtgtgcaccaaggaggcccggcatctcgcccctcgtaggcgagtgccaatgaagggccgacactgcccatagtaagtaataaatttaaaacatggtacttaggatctagtatattctacataagttaagtatatgtacttagtaccataagtactagatcttttattttttattatttagttattttagttatattctttatgtgtccgtatcacggacagttagtgtccgtattacgggcagatgtgtccgcgtgacggacagtagtgtccgtatcacggacagttaatagtatccgttccatggcgaacataaaacatacgaatccttatagtacagatatttaagtttttactggtctaaccagttgttgacatccgaataacttcttctggtggcaaaactttggaaaatgtgcatcttttacctctcccttgtgtggatgtttcaaccactcctgcacattctaaagttttaacgcacgctgctgcttttgttttctttatcccaacatctgctgcaattttccttgtgcttggtgtgaagcgtgaatttcctccaagcttataccagttgtgcaggtagcagtatacgatcttgtcatacaagtcaagaacaacaacctccccagttgtgtcattcaaaacttttgacatagatagtatttcaagggggactttaagatatagcagcttatccccatctttcatatctcctgattctccttgtgtggcaattttctttaaaatagcagggattactccctgctgtcaatatcaaaactcattgcaatacggtatgcctcttctaattgtaagagtctcccccacacatcccaaccgacatcaagctgcctgccaaacaactgttgtgtggttccgtgagcatgaccgaacagttggactgatccgtgaggctttctgttccactttgcaaactggtaatggctcatacagatcaaattcttgttgtggcgaagctcgtaataatctacaacctcatgaccgaactctttcataattctgacagtcgtccttgtgtcatggttgccacgaacaagaataatatgtccgttcaacatatttagaatatctggaagtaagttgttgatattcttatcattagtgcacgcaatatctcccaagtggaacacagtgtctgcaggtgacacaacagagttccactcggcgatgattcccgcattcatactgtcaagattgtgatcatactgagatctgtgtttttgacatgaatcaaactccatgacccgctggtggagaaagtgtgtgtcgcttgttacaaagtatttcatacattcctcatttaagtttaatgcagtttttaagctggcgttccatacgatccacaaccttgtctggaacatcatgaatgcttttattaccgtggcggttttcaaccacgatcacggtataactatacccatgagtgattgccatgtcaacatattcctgcacatgtttttcttttgtaaacgtattacttaccacgatacggtcgtatcccatacgcatcatatcttctacgttatctttgcaccattttgctgcgagtgttactttacttgcatcccagttgtaattgccgtcatcgtcataccagaacatgtcgttctcaaaatgtggatacagaccctctaaagatagcgcatttgccagtgttgatttgccagaccctggtagaccacgcacgatatatagcattttagacatagcgaccctccgttttaatttcaacggtagtatacctaactgttttgttaatttcaagtgttgacactaagttatttgtgtggcaggatagactgacaaaatgacaaatgaggaacatataatgaagtattttaatgcagacgacctagttgacaaaggtcttgcaaccagtaggtattacccagatctcgggttaaagatctataaatatgctagaaaagtattttacaacaatttatggcatttgtcccctcgtttactggagtgccgaggcattgttgtaggtaatgaaggaaatgttgtggcatggcccttcacaaaagtgtttaacttgggagaaaactccaccaacctgcctgacaataagcttgtgactgcggtagagaaaaagaacggattccttggtgtggtatcatctcataaaggtgacctattgttctcaacaaccgggtctcttgattctccatattgtaaccttgcaaaggaaaccatccaagagcaatgtggtaatttagatcttatcaagaaggttatgggcaatgaaaacatgacattcatgtttgaaatttgtcacccttcagatccgcatattgttcaagaagaccatggcgcatatttgataggttgcagatataatgattctggaataatgctaccagaagcagctttagatgggattgccaaataccttggtgcaaaacgtcctaacactgtgcgtgaaattccgttcagctatgcaaaagaattagctgcagaaacaagaggtgaagggtatatgattcgtaagccttactacccttatgatctgcagctgaagatcaagtctccatactatctggcacggaaggcagtaatgaggggtaaagcttggaagatttgggatgatgatatctttaaacgtgttgacgaagagttttacggtatggtaaaatttattcgtagcaactatacagaagatgtgtggaattgcttattagagcaggagcgtcgtgagatactggactactatttccacaacgaggactatatgcaatgaagaagtggattgtgtggcttgatgattttagagatccgtcagattatggactcccagacgctctgtggctaaagaattcttctgagtttatggattttcttaatgataagagaaagctctacagacgcgtatctgagtggtattttgacaatgatctaggtgaagtgcttgaagggtacgactgcttctctgcgctagaggagaaacttgtattcggaaagccaccacttattgacaacgtgattattttcgtgcatacttctaatccatcggcagctcgtaaatttatgcttgctgctgactcattcaagaagtttggaatagagattaaacaaaacatctactgaggacacttatgcgacgactgattattatctccggtgctggtttgagcgctgaatctggtattcccactttccgatctggtagcactgcaatgtgggagaatttcagcatcgatgaggtgtgcaacatccacacctttgccaagaattactataaggtgcatgacttttacaatgcacgtcgtgtagctctgggcagtgttgatcctaaccttgcacatcttcggatcgctgagtggtattcccgctggtctggtcgtgtgatcaaccttaccaccaatgtagatgatttgctggagcgtgctggtgtaaaacatgaagatattttacatgtccacgggtatttgcctgaaatcacctacgaagatgctgaaggtaatgatgtaattaaaaatatcggatacacggaggtagatacaggcaagtatacctgggttaagcccaatgtagtgttattcggtgaggttgctcctaagtatacagacatgtatgacctgttgacatctctcacaagcaatgatatggtgatcctagtaggttgttctaacacagttattaattttaactgggaattgtttcctgctacttgtaaaggcacaaaactgctgattgtaaacaagtatgactcgcagagtgcagatggaagtggcatttcacgtagcgacctttatcaatatgaggatcgcgggatccctgtatggtttaacggtgctgttgacgctttctctgataaagcatttattgaaactgtagaaaactttatggaactttaaaaggagacctttaatgctgaatactaaactgatcgacaacctggaaaaactgtctcagcctgaaaactacctttggtctgccaactgggtggaaaactggaaccgtgtggcagctaaagtgaaaaaatcatacacaccattcgaattacagcttagcttcattgaggaagagttcaatgaggttttggaagagctggagaaaggtgatggtggagatcacctgctaaaagaggcctgcgatcttcacgttgtcacaagttatgccgcttatcttgttaatgataatcacgaaaagtggtcaaacctgtttgataatccacgaggtcttaagttcaagatcggtgagttctatgatacactgatcgctgcgaaaaacacatccaagcaaagagcgtcagcttaccgcttagcggagttgtcaacagctttgctgttccagcttcgcggcgatgtgtgtgggatgatgcggaaggttctcaaatctaatgacagcaagtttgcacggatcaaccatctacgatattctcacggtgccagtgcagatatgtctactgaattgctcatagagttagagattgaagatcttgagcgtcgttttggtggtcgctacgaaggtttcgttgctaaagaggagttctacaacggtaataaagttattatattccttgacagtaaaggtaagattatgaagccttcgagcttcaaggatgtaacagagtatatttaacaacatagccgggattacccggctttacttattatggaaagtatgcagtgaggtagttagttatgtacaagcattccagagatcttgaaaaagatgctgtgtttggcgaccagatgaaggagctgatcaaacttataggtagaatggaagataagtttgacactaaaatctacatcgatagcaagatcttcaaccacaaaatatggacaaatgtgtgtgttgggctacatggtgataaagatattgtaaatttggttgtaataaagttcatagtgtggcagaataggactatacgttattccgatccacacttacttgtttatcctataaaagacctactacagaaggaggactgcaatgccgttatttaatcttgctaaacctgtagaagcacaccagtttgatggaagctcttcatcagtatctgatctgcaacggtggattgatacaggtgtgtttacatcgtcacctgttcggaccagagatattcgtcgcatgtgtgagcttgttgagccgtttggcaacttggttttgtaccagggagattggttagttgactttatgggagactggttggtaatgagtaaagaagagatgtttaaaatttttaaggaagaggccgagtaatgcatcaaatcaaaacaacactgtacgcactgaacaaagatggcagctaccaacagtggaaagtattcactgatggcgaaaaggttatcgtagagtttggcaagcttgacggtaaattgcagtacaaagagacggtatgcacacctaaaaacgtaggtcgtgccaacgagactacagctgagcaacaggccgagcttgaggctatcagcaagtgggaaaaacaagtccgtctggggtatgttgaaaacatggaagattgcgagcagggtgttgatcttttacctatgctggtgcatgactacctgaagcgtggcaaggcacttaaattaccttgctggatcttgcgtaagttagatggccttcgtctgcttgttgttttccaaaatggtgagcctaaatttatttcccgtggtaataagtcctaccctattcaaggaaagcttttagagcaacttcgttctttccattctaccactgggattaaacaacttgatggggaactatacattcatggtcttcctttgcagaaaatagtgtctcttgctaaacggtggcgcacacaggaagagattcaggccgagatcgataaagactatgaggcagataaaaaacgccgtcatgcagcaattaaggcaggcttatcaacatacaaaaacttcaacaaggtagatattcctgtcgatgttgagcctgttcgtgatgatttgcgttacggtggatactgtagctacgatctggagtatcacatttttgatattcctagcgacaaggtgtggtgggatccagaaacagagtctggacgctgcaaggatcttatggatgcagaggataccgttaccactctgatgcttgatcatatcaaggttgttgacgcagagcttgcgtacacagttgatcattgcgaagaatctgttggtatattcatgtccgaaggatatgaaggtactatcatgcgtaatttctgcggtaaatatgagtatggtcagcgaacatctgaagcattgaaatggaaaaagttcaacgacgcagaggtgaaagttattgacgttgagaaagataagaatgatgaaggtgttcttatctgtgttgacaaggaaggtattgttgttaaaatgaagatgaaaggtacgcacgaggagcgtagctatgacagaatgcaggaaatgatcggcaagtttgtcaccttcaaatatcaagcaaggacagaagacaacaactaccaattccctgtcggtatctgcgtccgaaatgttaacccagatacttgggaggttctggaatgatgtaggatggtttagtaggtaacggtagccaattgaatgatggtttttcaattggcacctacataaccacaccacacagtggtgctgatcggggctcgttatgagtgaactggagagtatgaaaaatgaaacttgataaaaatattcaacgaaaagctttcttggatcttattggctgggcagagggaacaacaacccaccctgccaccaaatgtggaggatacgatgttgtagcatacgggatggacggaaaacctgaaatctttacagatttttctacacacccttttgcaaacggtcgccctggtaaagtgtttaactcaaaagggcaaagaactacagcctgcggtaaatatcaatttcttgtcaaatactgggaacactacaaaaaacagcttaagttgccggattttggaccagatagccaggataagtgggcaatccagttgatcagggaacgtaaagcacttgaagacatagataacggtcatattaaatctgctatacgtaagacctcaaatatttgggcttcgttcccatacaaccagtacgaccaaaatccaaaaaccattgacaagttgcttaagaaatttgtagagtttggaggtgttgttctggattaatgatcaaaaggtaggccactcgcctacctttctacaccagaggtgtgttgagatatgaagatacatttcttttttaatgatcattacccttattggtacaaggatggtgatctaatcttttggaaacctggctacagtaggaatggaaatagggctggacactacaacaaaaagactggatatttccaagtgtacaataagctgacaaatgttaaacgtggcagacatagggaaatttttgacatgttttacggatgtgtcacagatacttggcatatcgatcatatcgtatctaagaaaaattctactaacggagtgcctgtagacaagatagaaaaccttcaaatgttgaagccatgggataactactgtaagagagccttggaaaatgtacaaagcaataatacctctacagtgactggtgtggtatggctgaaaagagagggtaagtggagggcaagtagaaggataaatagggtaaatgttaggttgggagattttgacactttcgaagaggctaaatctaggattgaatggtcgatagccaacccggaagaggctttaaagatagttccaaacccgcacaagaataatatcctgcccggtattgattggtctaagaaagatacctgttggagggcacgagataacaaaggaagaaacttaaggtgcttcaacgacaggaagtggctaaatccgtggtgggaggcagtttgtgcaagaaagtcttgggaagtaaactgtctctacggagagatgtcactaactgagtggaagttatccagaggctatccaagaccttgtgttaaggattgatcattgacataaccacacggacgtggtattgttacctcataaaatgtttaggagggtttaaccatgaaagattttctgttggcaattttgttcatggcagcatgtctggcctgtggtgtcgtgtttgcaggtgaaacagcgtatcttgtcgatgtataccgggacaatggtaaacgtatttgcctttatgagacaagtcaaggtgagctctacgagcttgtgaaacaaggcgaggctggatcttgtcctcgcacccatttctttgaatgaggagaatacgtggaagacggacgtttaatgaagtctgaacgcaggcttattgtgcaactgatcccagaaacagcttggtataataacctccgaaacgctgtaaagaagagtgagtgggataagatccgcaagaagtgctatagagaagccaactacacctgtgaggtgtgcggcggtaaaggcagcaaacacccagtggagtgtcatgaactttacactttcgaagagggagtgatccggcttgtcggactgatagcgttgtgcccagattgtcacacatcggtgcatcctgggttagcaaatatccgtggaaagtatgctcaggcagttaatcagttggctaaggtgaataagatcaccaaaggtatggcagaggcgtattaccgagactgctttgcagagtggcgtgagcttagtaaagttccagaatggaagactgacttttcgtggatagaggggtaccttgatggctaagagacctgtaaaagagaaattcgataagacagcttttgtattcgatacacctctggacgatatcatcagaggtatgcaagccttgtatcggaaggctgaatctgagcagttgtctgaatcagaactttactggcttggttggtgggagttaaacctgcctaaagctgaaagttcttgtctgagaactgttaaaacgtgcgcccaagaaaacgctgcacttggaatctaccacaaaaggaaaagatcaacaaaaagctctccaagaaagactaaaaagtcttgacaaaagtgttattaatctgatattatcggtcagatatctataaactaggagaaccagatatgcttaaaatttttattattgaagataaagatattgtccagttgtatgcaaacgagaatcataaaggtatgattctgaagaaggcaagtaaccttcatgaaaacacaattcaacctggtgatgtaattaagatctgtggttatatgataccagactccttgatgaaaataacccaccactgggggtctaatccgttcctttttgaaaagtattgggatgttgagtcacttattgcagagagtgatgatgcattccattacagcatccaaccatcttgcagaataactaacaggagggtctttgagtagagaatatccacttattgagtccatagattgtctggctgatcttcttgaacctgacgctatagtttattatgacttcgatcaggttgcatatcaagctgcagcaagttgtgaaaaaaggacaattgaggtaacacacaaagcctccggacgtaagaagatgtttaaaacacgaacagagttctgggggcggcagaagaacaccgttggtggttggttaaaagctgagaataccaaccgtgaagctgcatgtaaaaaggctggcaaggagtttattccgtggacacgagaagatttcgatgtcttggatatccaaacccctgatcctgtagagaattgcttgcacacaattaagtgtaaagctaatgcagtccttaattatctcggtattccggaagatcggtgcgtgggggtacttggaggcacaggtaatttcagactagatcttcccatgccggaaagatataaagccaaccgtaacaatactcttcgaccactgctgcttggagatgcaagacagtatctccaaaagcagtataatgctcaagtgatcaacggtatcgaggctgatgactggttagctatccagcaatttgaaggttggaaccactaccaaaaaacaggtaagttcaacaagtttattatctctattgataaggaccaaagaacactaccggggcttgtgttcgatcccatgcgaaacgataagggagattttgtaagggaaacccctatgctgatcgataacggtatggggaacatcttcatgaagcctaatggagaggttggtggttacggaatgctgttcttcggataccaaatgctgtgtggtgactctgctgacaacatcaagccgtatcaaggacttatcggtaagggtaagttcggggatgcctcagcattctacctactgtctcagtgcagcactccaaaggagatgtgggcggctattattgatcagtacaagaagtggttcccgaaaggtgttgttaagtatactgacttcaatggtattgatcgtagaatttccgtaggtcagtggatgagtataatttttgactgtttgtatatgaagcgaacattcaatgatcgaacaaaacttgttaacgttcttagaaatgttggagcaatttgatgactaaaaattctgtagataatgcaattatggaagctgtttttgaggatgatcatacaacagggaccattaaaacaaaaaatacatttattgttgccacaggtatgtggcggttgtatgaagatgacactatttcatacatcctgtacacagatgattacgcagatgaccgtgtatggtctgctgttttaaaagaggattgtgagttgattgagggcgagcggttatgcatgttcaccagtgtggaaacagatgttaagctttgctctctcgtcctgttcaaagataaggcttatgctcctgatgaaggagaggaggatgaggaagcatgagagagcgtctattatccatagaccagtcgttgacacacacagcttgcgttgtatgggacgatggaaagcctgttcataaggttgtgttacgaactcaaagctcatctgcaaaagagaagaaaccagggacggtttcttttgcaacagctgctgagcgtattgactggatctgcaaacaggtcagatattatatccacacgcacggcgttgacaccgtggttatggaagggctttcctttggatcacgcggggatgccacacgtgaactggctgggttgttttacggtcttgaagttatgctttgggatgctttggctgattgtgaaaatgacggcctgtttaaggtccacacagtgacaccaacaactgccaaaaagtttgctcgtagtcatcttcctgaggaacttgcttttgaggagaagaaaaagcttgacaaaaagacaggtaaagagcatactgtgaagaaacctgttacgatggataaaaagttgatggttaaggcctgcgaagtatctgaaccagggttcctagatgggatcaatttggtacaaggtaaggccgatctcgcagatgcttattggataggcagggcgcatctggagggattatcgcaaagcgtaaaataagaaagaaagctgtcaaagccccagttcataacgggtggttaaaagattctaaggacatagccaactttcgaaaagaattgtcagaggagcaagatggtcttgatccgatcttgtgcgagccacttcgtaagccttgtctagatcatgatcatctgactggtcgttgcaggggtgttttgtctcagtgcactaatacctttgaggggtatgtgcttaaatactggatgaaatactgtaacgagtatacagattgcagtttatcagaggcgttgcgccggatggctgactatctggagaaagactacagcgacttcccgctccacaaaaactacagagatgatatgacaaagttcttgaggagatgctctaaagctacgatcattgcacgagcagaatcagatctcaatcttgtcattaatccagagtgcaccaagcatgaggctattgagttctacatgcaggagtttataaagaaaactgaggagagagatttctatggggatgaaaaaggtattcaatccttgcgattcagttctgatcaggatgaaataccgtaactggaaaggtgttgttgcagatcgctgcgttactgagcctaatttatggtttggctctacagaatatcataaagaagagcagtggttgatgcatgccttcgatgtagacaagggcgaatatcgtgacttcgctttaaaagacattcttcagttttactaaggaatcttgacgatgatgacaaagttaactcttgagcaaattttaacactaaagcaacagggatacactaatagacaaattgctcgtgaatttttaggccgtgagtcacgtgagagctggatccgactacagcttaaacgtgcacaagagaatatgtcagagattgtaggagaagcaacggagcgcttccttgaagagcacaaaggcgctaaagtttgggtgtatgatacagagacatccccaacaaacggctggttctttgggcactataagaccaacattcaaacctgtggtattgaagttatgccttatatgctaactttcgcaggtaagtggttagacagtcctagtgtggttgactgcgctcttcccgattacaaaatgtgggatgaggatattcacaatgacctcgaattgattcaggacttgtggtattatctggataaatgtgatgtcgcagtagcccacaattcaggttttgactgtgggtgggcaaaccaacgatttgcatttcacgggttgcctccaacaagcccatacaaagaggttgacacccttaaaatgatcaagaaggcattccgtttgaatgcaaacactttggagtatgcatgcaaatacttccaacttgccagacagaaactgattgaccacacatttgaaatgtggatcaagtgtgttcatggtgatcttgaggcgtttaaacagatgcgggagtacaatgttggtgatatcctatctctggaaggcctgtatttgctggcacgcccgtttgctaagcagcaccccaacatgtcattgtactaccaggatgaggagccaaaagttcgttgcccacgctgcggtggagaacaccttcacgaggaagaagctttggcgtatactcaactgagtgcatttaaaacatatcgctgcgaaggttgtggatctgttgttcgtgaccgtaacaacatccgtaccagagaagaaatgaaaaacaccctgattcagataatctaatcaagtatagggaggcttgcgcctcccttttccttttggaggcactttgagcaagaaagagtccaacgacaaatattacacaaaccctgagtatgcagaatatcttgttggtaaagtaaaagataagtatggaaattgtgcatacgttgagccttctgctggaaggggttctttttcaaaactattttcagagatactgtcttacgatctagtaccagatcctgaatttgaaggaccaacaccgtgcattcaggcaaacttcttggaggtgcatcccaaggcagatgtcttcataggtaacccaccatttggcaagaattcatctttagcttgcaaattctttaaccattgtgcatcattgctagagcttggaggggctatagccttcatcttgccacggacatttgaaaaaatattttttgcaaacaaactggacatgtcgatgcaccttgtctacagtgaaaggtgccctaagaactcgtttctacttaatggcaaaccttatgacgtgccgtgtgttttccaaatttgggagaaaaaggcgtgcaacagggatcctgtagagattggggagaataagttattttcttttagcactccagatgactacgacttctgtgtaagacgtgttgggtataatgctggaaaagtattgggggaggatgacccaaaatctgaagaatctacatatttcataaaatctttagttgacggtgttgacagagtgtttgctgaatgctattcttcttttcaagaagaagcaggtaagactgctggaatgaagagtataggcaagaaagaactacaatacattttggagacccggtatgatcaaaagcatagacttgaccaaagaacttactgatgcaaaagcttttggtgagacagcggtacaaagaggccaggctatgggactggcactacctttcgtcttaaaagagcactttacagattttcaacttatcaagggtgataagggaattcttatcctggagcataagttgagtaagaaacgctataaagttgtttttaattctaaagctccaacaaaactgggattcagaacttacaatcttaacccatcctacactaagggtgtaggaagagtagaacaacagcatttcagtgccagagcttctttagcccctttgatgctaaatttttcaggggtggctttaggataccttgacaagaaaagagttcttcatgtccgtttcacagactttgtaacgcttttagctaacaatgaggtagatgaaaagggacgtgtaaaaacaaacttctaataacgcatagtatgattggagacagcaatgacactaaagttaacagttccagacagcttttcagaaaactttatcccagaaatgatggataagatgcgatcattgcttgatcagattgaagaggctgtttgggaagacgatgctgtagtggctaacgagctggtagataagtgtaaaagtattattgatgcagttgaagaataccacggaggtttttgatggatattattgttcttaacgccccacctagtagtggtaaggatcacattgcagatctcttgttggaagctattcctaactcacaccatcatgaggttaaggagatgctcttcagcgtggcaattaaggcagctggtgtaactcctcaactctggaatgcactttatgaccgccactacaaagaagagccttgccctttcttaatgatagacggtaagcatgtttctccgcgagagtggatgatccattgtagtgaaaatctgattaaacctatctttggtgaagatgctttcggtaaggccgcagtcacatccttgaagaaagatttccctaaaggtaaaggggttgttgtttactccgatggtggattcaaagaggagctggcatgccttagtgagtacgcatacagcacaggtggagatctgttgttgttccgtattcaccgtgtcggatatgactggggaaatgattccagaacctatctaagtctggaaaagaacggaataaaagggattgagttcgatgttgtaaaccctgaaggtgcaccttgggagtgtgcatcggagattgtgtgcaagtatattgatgctaaagaggcccaagaagaatgttaatcggaattgatgtagatttgacactggtagattcaggaacagcatggtgggagtggttggagcgtttgtatggtccagccagtaagacagtcgctaaaccttctaatggactgatgtattacgatctgtcaaagtattggcctgatcgccccaaagaaaacatcatagggccttttgatttctggagtgacccattcctctacgactttcttaagcctgaagagggggctattgaggttatgaaagatttggtggctcgtggtcacaagcttgcatttatctcggtatgcaagaaaggtcaccttgcatctaaatcaaggttcttaaagcgttggaccagtgattttatggatctggacgatcacacccagggtcacggcttctacgccacacatttcaaaggaaatgtggctgtagatgttataattgacgacaggcatgaatacctcaaccaattcgcttcacgacctgaagttattaaaatcctaaaagatacgccttatgagcaattcgaggagttaaaggtcagtattgactataccgccaatagctggtataaaataggaaagtttttagaaggtatttgaaatgggcagatgttctaaaggtggcgatcctgtagtcagatacggagactggctagaggtatataatctggagggaaagctagtgtatgcttccaggatcacccaggatatgtgctctgatatgtttaacaggtaccttgcatttaaggccaacataaacccagacgaaatttccaaaattaaaacaaggagagctaaataatgctaaaactgtgcactgcaaagattattgctgacagcatttccgagaaaggtaagcgtataaccacttttgagctagagtatcctagaatcattcactctgaactcatgacacaccgagttttcagcagaaacgccatgtcctctcgtgcagtacctgttaacaaaatgctgcagcaggttgtggaaaatcctgcaatgccagttcgttttggtgtaaaccagcgaggtatggaggatggtggcgatcacgatcagaagatccgtgtagagtatactgatcttgagttctctcctgaagagttctggaaagaagctgccaaaaatgcagcctggcatgcagagaagttcgcacttgctggttaccataagcaagtgtgtaaccgcttagtggagccttttcaacgcatgaaaacagttgtaacaagcacagagtggaataattttttccatctccgttgctggcacgatgcggatcctacgattcagatgttggctaattgtatgtgggaagctcttgtgaatagcactcctgaaatccttaaaccagggcaatggcacactccatatgtagagcacgtttatttggacggagagtttaactacgctgtacttgacacagaaggaaagctctgcattctcgatactaaagaagctctgtctatcagtgctagttgctgtgcacaagtatcttatcgaaatattgacagcacgtttgaaaaggcagacagtgtggctaaaaaattgattggtggggatcgtatccatgcaagcccttacgagcaccaggcaacacctatggatcacgataacgcaatggaacgtttaaactactacctgtcttcatgtgaaatcacacaagacagctgtgtttggcaggaaggtgtaacccatcaagaccgtgatggtaaattctggtctgccaacttttgtgggtgggttcagcacagacaactgcttaataaccacttcgtgaaatgttaatcctatcacagcgataggtaacttttgtgttgactaatagtatcagataatctataataatggctcactttgttggtgagccagaaatggagacagatatgagtaatgttatgattcctaaaaagacatttatttcagttactttagatttcctagctaccgtccctgggtttaacgttcgcacacgaaacggtctccgagctgcactctttgccgtagggtttgatttaaaaagtattgatgttcttcgtggaaaaaacgttcgatgcaaaaataagccaacacattatcgaaaggcagatgtatttgctggtgttatgcgtgcagactttagatacccgcaaatgtataacggtgtagatattttagatgtggataaagcacctggtgaggcaatgcttgttcaagatctcccgtatgatatcccagtagaggatcgtgttaatgtaagaaagtatacaaaacaatctgaaaaggctgaagatattcatattgttgatgaacctttcaattttgaagatctgcatcgcctggaaaaattattcggtattgaaagctaaggtggtgaagatgagtcataactccaagtggaaggatcttggttttgcaagtcgggcagaatatgttggttggctttggttcaacggcctgacaaacgatattaaaatgtatgatgatgtttattatgacgagtatacaggcaaaattataaatatctctgtagaagaggatacctttatccagcaagatactgatacctgccttgataaatacgttaatgaagtggaggaagcaaattgatcaccaaggtaattaaaagcaacggatgtgaagtggcattcgatccagaacgtttaaataaggcagctattttcggtgacgacggtaacggcaattggtcacatattgcactggatgcatacaaacgactgtatgatggatgcacaaccaaagaagttaaccaagctattatagactcctgtgttagccgtaaagacgaagcacattcccgtatggctggtcgtgttcttattggtcagatttataaagaggcttttggagggtttacaaagatcccttccttaccatcattttacaacgacatggttgagaaagggtattgggaggatatgggttatagctttaccgagttaaacactttaggcactgttattgatcacagtaaagatctcggttatggctatgcagtccttaaacagtttcgcgacaaatacgggatcaaggatactcttaaagacaccttgtttgaatctcctcagatgatgtttatggggatagcaatggctgtcatgaagaatatgccgaaagaacgtcgtatcaacgatgttgtaaaattatacacttatctgtccgacttaaagatcaatgccccgacaccgtacttaaacggtctgcgcacaggtaagacagggtatgcatcttgttgtgtaataaaagctgacgatacagcaaaatctattggtgtggcacgtgaagttgcgtacacaatgacggttaaccaagcaggtatcggctactacttatcctcaagatctgcaggcgatggtgttcgtggtaacactattaaacatatgggtaagattccatattatcgaggtattgatgctggggttaaggagaacagacaacaatcacgtggtggttctgcaacagtatcattccttgcactggacccgcagattgatgagctaatccgtttgagaaaccctatgactgttgcttcaaaaagaatcaacaccatggactactccatcggtattaataggtcgtttatcaaccgtgtggctaagaatttggattggatgcttgtttcttataagcacgcgcctcaactgcatgagggtatcttcaccatgtctatggaggagtttgatgcagaggttgatcgtatcgctaaagatgacagtattcctaaaacatggatccgagctagagatcttgctgttgagctgatcacgcagcgtaccgaggtgggaagactgtacgtatactggacagatgagatgaatagacatacaccttttaaagatgtgatctattcaagtaacctgtgtgcagaaatagctctcccgacaaaaggctattcagatatgcgtaatatcttcaagcacgatgttgatgatggcgaagttgcattgtgcttcctgtcatctcttgtagctgggagggttaccccagaggagtatgaggatgttgcatactacacggtgcttatgattgacaatgttatggaaatcatgacatatccgtatgaaaatatggagagcactgttaaaaaacgcagatccatcggggttggccttaccaatgttgcacattttattgccagccacaaggttacttacggatctcctgaaagtaaacagcttgttcacgatcttgcagaacttcacagctacagcttgcataaggcaagtttacggttggcaaaagagcgtggtgtctgcgagtggatgcataagacaaaatatccagaaggttggttaccaatcgacacctataacaaagaggtcgatagcgtggtgaaagatccttctcttaaacaggattgggaagggttacgtaaagagatcattgaaaatggtgggctacgtaatagcgttcttgaagcatatatgcctaatgaaagctcttcgctggcaacaaacaccactaacggggtttatcctgtccgtgagcacattatctttaaaaagtcgccacaagggcaggtgctgtttatcgttcctgactatgatgagttgaaagagtattacacttcggcttgggatgttgatactaacgacatgatcgatatgtatgctgtgattcaaaaattcacaggtcaggcaatcagcgcggatttgtacatagactacaccaagttgaaagatggtaaaatttcaatgaaggagcagctagggtaccttatccgtgccactaaattcggaatgaagacatggtattatttaaactctagggttggtgctggcgactccttggcagaggaacttcatgccaagaaacaggctgaagatgaaaccagaaagaactatcctttgaatgcagatagttcagttgaagatcagtattgcgaaagttgtgcactataattttaaaggggcttcggccccattttagaggttagaataatggctgtatttaatgctgagaacaccgctcataaaactggtgactatccgctgtttctaggacagcaaatgggtatgtacgactctatcaacaaaaaatatccacaactgtttgaactatacaaaaaacaaaaagagcaagattgggcagaggatgaagtggatttgtcgcaatctatttcagattttgtaacatgctcaaagtcaacttatgacgtgatggtgcagaccttgatgtggcaatgggaggctgatagcgttgcggcaagatcgatcatctgcctcttttcaccattcatcactaatagtgagcttttcactctattgatgaaacagtcagagattgaagttcttcacgcactaacttactcagagattgttagacaatgcctccccaatgcccgtgagattatagaagagattcaggaaaaccaaaacgttctgagcagatccggcgttattgtcaaatacatgcaagagcttgaggttattggtgcaaaataccgcctggatccttctagtgttgaagaagatattgtgcggaaatgcattcttagagcgctttttgcacttttagccctggaaagtattgagtttattgcaagttttgcatgcactttcgcagtagctgaacagggtatttttgttcaggtggcgcagcttgttcaaaaaatcatgcttgacgaaatgctacattcgaaaggtgattttgccatcattgatatcttgcttaacgatcccgcatgggagaaaagcttcctggagataaaaggggagttaaaagagattcttgatgaagtacgaaccaaagagtacggttggagtgactatattttcagcgaaggaagagcgattataggtcttaactcaccgttgcttaaagaatgggttgactataactgctcaccgatttatgattactacgacatcgacaaagactttgtgccgccaacaaaggacccgctaccgtttatgcaggtgtggatgaaaccttcattgcaacagacggcgaaccaagaaatgtcgaacactgactaccgcgtcaacacaactgttaacgacgctgaagaagaaatttgggagttttaatatatgagctgcgaaaaatcttttttcatcatcatttacggtaaggataactgcccacattgtgtcagagcaaaagaatttgcaatcagcaaaggtctgccttttgtatataagacacttggcgagggctacacaaaagaagagcttattgagaagtgtagtccaatcgtcccccgaacgttgccgcagatcttcttagaaagcgatcttgacagtatccatataggcggtgccgacgatttcatctcttttgttaagaatggttttggagagaaaaagtgaaagttgtaaaacgggacggtagagaagagttctataacggaattaaggtgatcaaggcggcagagtccgccttacttgagtctggacatactgaagaagaagcttaccggatcgcttgtgcggttaatgaagttgttgctaacaatctgccaaccgaccagtgcacgatctctgtaaaaaatatccatatccttgttgaagatgctcttatggatatgggtttaaaatgtgcagccagagaatacatccagtatagacagacaagagataataacagagaggcaggtggaaaactgcttgcagatattagtggcttcttggatcgaacttgtgatgaatttacaaaagaaaacgcaaataagcctactaatcatgtacacactcatcgcgacctgcttgcaggtattcttagcaaacaccttgcatcaacacagatcctgccagaccgtgtctccgaagagcacaataaaggcttcatccatgtgcatgatcttgactacttgatcagtccgttaacaaactgttgcttggtaaattatccagatatgttggaaaacggattcaacattggtaacgcccatgtcagtaagccgaagtcaataggggttgcaacaacaatccttagccaaatctctagtgcggtagctagtgctcaatatggtggtcagactatgagccatattgatcattatctggcacagtatgctgaagcgacctatgagaagaaccttaaattttgccaggaacattggttgccagatgctgaaactgttgcaatgcaaatgacagataaagacgtgtttgacagcatgcagacgttgctttatcagatcaacacactaacctcggtaaacggttaacaaactggccgttttaaaactctgctaaccttagtatgaggggtcagctgatcgctggctaacggggaacgctaaggcgaaagctatgccaatcccgtgactagcttcacaaggagtgaggcggttgtaacgactaaccttttggtgtagggattatggaagattccgaaacgcaggggtctgattaagaatcacacggtgtgatttcaggcaagagatagtctggccttgtggaaacataagggtggggaccgcaaaccccttttatcacattaagtttaggactggatacctcggtctttggtagaatgattaccaaaaattacttgaaagtccacaaaatgggtcttggtgaagaacggatcacacctgtgttccctaaagtgctgttcttcctagaagagggtgtcaacatgaaccctgaggatcctaactatgatttgaaacgattagctctggaatgctgtgcagaacgtatctaccctgacttcgtatctgtaccactaaatagaaaagtgacaggctcgacagatggcaaagtaacgagcatgggttgccggagttttcttagcaaatacagtgacttggaaacaggcgaggagaaatatcttggcagatttaacttaggcgttgttagccttaacctaccaatgattgcggcaaaagctaagacggaaggtgttgatttctttgcagttcttgacgaatacttggatcttgcatacgaggctcaccttgtaagggttaaccgtctaaaaggaacaaaggcagggcagaaccccatcatgtggtgtgaaggagctcttgctcgcctggatcctgaagagagtattgataaactcttctatgacgggtacgcttccatcagcattgggtatattggtgtgtatgaaacctgtcagattttgggtagagagggtgacaaggctttagctcttggaatccttcagcacatgagagatgcttgtgagcgatacaagaaggaaagtagactagcgtttagcttgtacggcactccttctgagagtctatgctataaagctgcaacctgtctggatcgtgaatatccggaagtgttgaagcacgagcatgaatatctcaccaacagtttccatcagccagtatggatcaatagctctccttttgataagtgggagtatgaggaaggttttgctatgatctcctccggtggcaacatcggatacgtagagacacctaacctgaaaaacaaccttgatgctttagaggctcttgttgacttcgggtataaacacattatgtattttggtattaaccaacctgtggataaatgtctcaagtgtggtttctctggtgagttcagtgcaacagctaaagggttctgctgccctgcgtgcggatgccacgatgaacaatatatctcagtgatccgaagagtgtctggatacctttccagtcctaactcccgtccttacaataaaggtaagcaagcggaagttatcgagcgagttaagcactacggaagttgtggttgctgatacttgacaaaagccacaaggatgtggcacccttagttcaaagacgagaactaagaggattcagcagtgagaaaacttacaaccgaagattttatagagggggcgaaagcagttcatggtgataaatatgattattccaaagtcaaatatgtgggtgcacacaccaaggttgtaattatatgccctgagcatggagaatttaagaaaactcttggagatcacctccgtaaaaaacagggttgcccaaaatgtcagattgaagcagaaagagcggcttctgctgaaaaatttaaagcggaggccgaggctaagtataattataaatatgattactctaaggtagagtatgtaaatgctaaaactaaagttgtgattgtttgtcctgttcacggcgagtttgagcaaaagcctgataaccatctccgcgaggggggttgccgtaagtgtggaggaactgagagaaagactactgaagagtggatcgctgaggcaaaagcgcttcatggcgataagtatgattactctcttgtaaattataaaaccggtaatgataaagtggagataatctgtaatacatgtggtgctcacttcccacaaagacctcatgaccatgcaccaagtggaaaaggttgccccgagtgcgggaagaagaaggtggccgaggttagtaggaagacgcagagaaagaaagcatctgaggtagctaaaaggtttgaggcaagagccagagctatccataaagataaatacgattattccggggtggaatatgttaatagggagacagaggtcactatcatctgtccgattcacggggagttcacacaaaaaccgtttgtccacatcaaccaaaaagctggctgtcaaaaatgtgctaaagtcggcttcttatctcatgaacatggtagcctttatatcatggttgacgatctggaagtaccaactatgatgaaaattggtgtgagtgtccgggtagatgaacgaagaaaagatgtgttaaaaagagctaaaaaagctggtgctagattctctgatctacatgttataaaaacttgggaaggaacaacagacgacatgcaaactttagaaaaagctatgcaccaagccttgagccaatacaaaatcaacttcacagagaagtttgatggctgtcgagagttcttctactacagaccggaggtattcgagctagtagaagaacatttgaagaaatttgctaataaataataacacacaaagggccagctttattctagcccttcagtccgttgtaaattaaggagttgttatgtcatctggtggctttaaagtaaaaatttgtaaacactgcggttgtaagtgcaatcttcgttggtgcaaggcactggacgattttatttggcattgccctaaatgtgatgcggagtatctatgaatattgccggatacacagaaatatcttacaccgaagggccaggtattagaactgccttatgggtatctgggtgcccacacgcttgccctggttgctttaatcaggcattttggtcaaaagataaggggagagagtttactgaagaagacttgcaaaaaatcttgtcagatttagataacccgtctgtgtgcggtatctctctgctgggtggagaacccttagcatactataatgagccagatattattagcctgatggagaaaattaaggaaaaatttggtgacaagaaaactattcttgtatatactgggttcacatttgaccatatctctagtaatgttcttaaactggctgatatcatcattgacggtaagtatgtaaaagatttaccaaccaagaaaccgttccgaggtagcgataaccaaagaatgtttaaaaaagtagcaggcggttgggtccaggtagactagttgttgacaaagctttgtttagataggtataattatcgtaaaatgaaagcagaggaggtgccaaatggctaaaaaagccttgaagaaggcgtacaagaaagagattgcgcttgagcttaagaaaaaacacaagcgtgaaaagaaacatcatgaagatgaagagggggtgcaacagtgacacaagaacgtatcgatttggctaataagtttgtagatctcattttgccacggttagttactcaacatgcagatgctatttctactaatcttgatggcttacgtctaatgctgaatcgcacagatgaccctcgtattcgggctgatttagaagcctctgccaacaaactggaaaagttcttgcaagtaggtacgcaagaagccttacacaagattatggtggaaggtttctctaaagaatttaccattaaagagcttaaggagctgatccaccaagaagagatgaatatccgagttcaggctgttgcaagcagcatggaagcggctattgaaaaactgttgcagtaaaagttccagacacatctcaatctgaaaggagtcccaacatgggtcgagctaaagaaacaaaacgcatgcgtgatgaagctaaagaggctcgcaaatctgatcgcctgcgtaaagctgctgagaaatttgctgaagaacgagagcacacagctccagctctccgaccgatgaataaaaaacaagagtattatctccaccttcttaaaactaaacagttagtgatcgcaacagggctgtttggcacaggcaagtcgtttatggctgcagcttatgctgcagacctgcttcgtaagaacgagattgatagaattattgtttgccgcccaaatgttgaatgtggaagccatggcacggggttcaaacctggaggtgtattacagaaaaacgaacctttcttaaaatcaattttagaaactctcaaaaaacgactcggacctggtgcttatagtacgttattgggagacggtcagactgggcgcatcgaggtgcaagaggttgcaacaatccgaggtcgagatttctctgatcgttgcatcatcctagttgatgagtttcagttgacaacctgtgcagaggctttggcaattgccacacggcttggtgagcatgcacaaatgatttgcatgggagacttacgacagaacgatctcaaaggcacctcaggacttcagtggctgatcgactttgtaacgaggcacgaaatcaacggtgttggtatcgtagattttgacgagccagaagatgtggttcgctcaggtattggtagactgtttgcactaggccttatgactgaccgtaataaaggtgtgtggacccctgaggcaggtttataatatatataggagagagggtgatattattcaccctctatttaagatgcgtttaggagaacagttatcacgagaagaagtgtttatcaagaaagctactgataagcatggtgacaagtatgattactccaaagttgtatacaaaaacaacacaacacctgtgaatatagtgtgcaacaagtgtggtacagtttttagtaaaactcctaagtctcaccttataggcgcaggatgcccagattgtaagaacagggagttaagtgagagattccgaatgtctaaggaggagtttgtaaaaagggcaacagaactgcacaaggggaagtatgactactctcttgtaaaaagtttttctaacaggaacgacactgttactattatttgccccatccacggagagttcaagcagacagttgcaaatcatttagctggtgggtgctacaagtgtggaaaaagagcgacagctaaaaagatgaggaagtctaaagatagattcatagaggatgctactcaactacacggagacatatatgactattcagaagtgaagtatgtgaatacccacactcctgtaaccattatctgcaagtcttgcgggtgtaagtttcttcaacagcctgcaaaccacctgtgcggtaacggttgcccagaatgctctacttcaggattcaggcagagtactaaagagagctgtctgtaccttcttgttgatgatcttaccattcccacggttataaaagttggggtgactatcaatctacagagcagactatacaacataagaaggaacacaaattttcctgttcacgtgcttaaagtatttactttcgagcaggggtgtgctaccatgcagattgaaaaattggtgcataaagtctttgcagatcgcaactgccacttcgaaggtttcgacggggcaacggagtggttctggtactctcatgatattgtagagtttctagaagacaattgttgacaaacagataagctttaggtattattatcggacaaaacaaggagaaggagatagtatggctacaatacaagagagactgaataaaatatactgcctgtttgtctataacggcgagacaattttggcaaataaaggatccaagaatgtgtggatcaaggacagtggtggtaatataatcaacttagcgttgctacgtgagcgccgacacagattctttatcgagtctcggattattgaaagcagcacctgctacagaacaggcgataaagtaattgttgacaatgatacgtggtatgtggtagactggcaatcattgagctgtgatgcttctgacaatcgtaagtattccctagtgattgctaaataaaggtaaatgtgaatcagttttaaataaatagctttcaacttccaatattaaggatttctcatgaatttaacacctcgcagcaccatggtacacggcatgaaagaaaaacagaacggtttcgaacctatgagtaataaaatgtttggtatgccgggtggtattatggaaacatacagctacccaacacctgttgttgaccacgttctttatatcgacgatttggaagacttacaagatcatatgtctcgtctgcagacgatccgtatggctcagccagaagaaagtatccgtgtaatcattaacagtcctggtggttgcgttcacattgctatggcgtatttgcaggcattccgcgagtctcaggcaagcgttgttgcacatgctgaagggatgtgctgctctgctggaacaatcttatggcttggttgtaaagaacgtactgtggctccggacacagagtttatgttccactactatcaaggtggcacttatggtaacggtgtgaacatgaatactcaggtcagctactggaaaaaacgttttgaacgcctgatcgaaaaatactacggtggggtgctgacagaagatgagatcgcatccatcacagctggtggcgaagtgtggttggacggagaagagctggcagcacgcactggagctattattctggatgaaggcaacatacaacgcatccagaacggacaaaaaccgaaaaagcttctggcaaaaggtgatgaagaaggcgtgttaggtgaagcaggtcttccggagattcaccagtgcacatctttagatgagttagttcatgctgttgaatctgcaaaagcgggtggttcgaaaggtgatgttcacactgtgttcctgaatctgcagatggagagtggcgagaccgtcagaattgccctgggtgagattacttcagaagatctgcagagattctctgtcgttgaacttcaggatattctgtctcaattgaagactactctgaacggcggtgaagaggttaaggtgaaagataagactcgcaagcgtctggtggacaatattattaaaacagcaaaagagctcaatgaaaaaatcctgggtgcaggaattgtcgaagaagcttaaacattaattctaaagccctcttcggagggcttttatgatctggagatttgcatgacttgtgctagaaaacctgatgaacaacgtaacgcctacgatgagtatgtgacaccggagtggtgtgcagaagggctgtatgaccttattccgttcccagaagactggacctacttagagccttgcaggaatagtgcctcaggtgtgttctactcccgtatgccgttaggatctgcatggggagaaatacaagaaggtgttgactatctgaatacagaatacaaccatgttgactgtattatcaccaacccaccatacagcctggctcgtgagtttgtagacaaggcgttgaaagatgctgacgtagttattatgcttttgcgtcttaattttctggaaagcaaagccagatttgaatggtggcttgataatgcacctactactgtgatcacaatatctaagcgtccatcatttcaatcaaacggcagaactgacgggcaagcatatgcatattttgtgtgggataagaaaaaccgtttagacttgccgccgtttatgtggttggcacccccagaggtagacctgaaatgaaaatgagtgctaaggacaaattacaccatctagcgctaaaacgccctgtaacgctccctgacgagcttaactccatttatgatgcgattgtaggggagatacaaaataaagcgttagcaggctttctggggtgcggattttcgataaatctaccctcgcatctctcagattacttcccgcacattgttggagatttaagggcaggaggtctgcaggtagatgttgttgggatctccccagagaaaaataatacggttgcctacttgacagtaacctggtagttgtgtattgttgttttcaacaagagggggtcatttatgtacaagtcattttcaatctactcaagacaggcgaaacactacacagagatcctgatcactcagaaaaaatctgtggaaggtgagtgggaatatcaccataaaatgttgcgtccagactgggtttttgatagacttattgctatgatccctctcggagaagtataccctctgacagcccatcgcgatgcttgggatttaattgattacatagattcatttaaggagcctagattatgaagattgagattactaaagaaggtaagaaagtgtccggcaactatgcaacagtaattcgggatttaatgtttgaagccaccaagatcggtacatctaaagttggtcaaactgttagtgtgaaaagtaatatctccacaggagagaaggtattcattgtggtcaaagggcaggatcccgtggaaggaacagtgggccgaggtggctacctgtgcatttctgaagagccgcgtatgttagtggctgacgctactatgggtgggaaacgtgtgtgcgaggcggatgaggtaatgattatccaacctgttgatccagatgacccagcaacttgggtggtaggaaatgaaatcttctctttagaagagttatccttcccagcaccgcgctctgttcagtaataatttatcttaccagggacggtaggtaggaggtagcatgaaagttaaatttcttacagatttagggtacccttccttggttgactgtgtcggtaaaattgtggaagcaaaacggctatctgcaaacgagaatgttgtcctggttaaagggaaggatttactagctgcaggtgcagagtctggcaggatctctcctgattatatgtattacctatctttaagtaatctgccagagcgaggcggtaaaggccttgaagttgtggaggagtgacaggtatgcttctgattaactgggaagacctctatggggacaaagaccctgttgcgtttgttgatcgtaggtggagatacactgaagaacaactggcggcaaaaaatttaactgcaaaacgcagaaagatcatccagtgcaagtacaaatacgcacagtttgctgcaaaagtgtctccacaaatcgagagctttgtgcttaaattgtatgacgagtacctcaaattcaaattggattttgtgcaggtgtaccgtgcacaggtacgaccagataccaacatatgtagatggaaggttgtttgtgaaggtaaagatttgccgctcagcttgacaattgagtggcgttatgggtatcatgagtgtggtctgtatgatatttgggatgtcattgtagatcctgctaagcatctgaacacagaggagctggaatatatcaataaggttattctcgatatgtttttcagctacacacatgaaaactctgagaaagaacgggataattttcttgacaccctcagcgaccatttgtagtatacaatttaacctacaaagggaggaccaatgagtataaatgttgtgctaataggttacctggtaatgtccgttataacagcggtattcttgacaggtgtatgcatcgtgtccagacgaagggtgaagtttgatgattttatcaccatcatcactgctgcacctttttggcctgttgttatcttcatcgtaataatgtgcctagttgattactacaagaatatcaggaaggagagtagggatggagaccgcacctaaaactatctatactgttcttaaagagattgcgttctacgcagatcttagccaggcacctttatgggaaaagagcatgtatttaaaatggtgcgttaatttagggagaccttccagtgtttcaagccatgtttattgagatgctatctgggatattgttactagtagccatcttaggtggtgcagttctgatgtataactatcttgaaaaaggagacagcaatggtaaaaaataaatctttagagcaggctgaaaaccttctccacgagctggtaaaggagtggaaagttgaatactcagattttaatgcacgagagggtgaagattattggcctacggagcgctcagagggcgaatggtatcaagattttatagagtggttatatcagacgtgcgatgaggggtgacgatgtttgttaaatatgtaaaaacgtgcctcaacagtcttggcagagagcattggtacaccttgcttgaaaaaggggaaattttaacaaaatctggaaagataactttgatacctcttgatagtaaaggtaaagacccgtcacgacttgttatagatgattacgttacaggtgtgacgttcgaggtctctgtggagaggttaatacgcagagctggcggcccttatgaccgaagagagtatgttttcgattccgttacagagatgggggagcatccgtctttaatgttcaggatggtaatcagagatatgaggtcatctatagataggatcgtaaaggacattaaggaaccttttagagtaaaagttaagaagtttttcgattctaagattaacatactcgccgttgcactaggtgtagttcaacttctgttaattttgcactattttgaactactatttaagtagtagttgagatatggcacaaaggatgtgccatagtgaaataaactaagaaagaggtagagagaatgccaaagattaaaacgttattactgtgggtagctgttttagcttttatagggtactggacttgggaaactgaattaaaagatatcggatataccagtcttgagagcaaggcgtgcattggcataaccgatgcgttcaggcaaaatgctatggatcacgaatgtgttgatgcagatatagatgagaaactgtctaaggacaaagatttttaccatgggcatgctttacttgatagtggtgacactgtagagttctggtcgtggtttcgtgaagatggaacaataaaaacagcagtaaagatctctaacaaagagttaatgctgttgcagcaaaaggaggctcaatgatctggatatcctatgctgatggcaccatgctgtatactgcaggtactaggtatgaagttcaggaggacgataaaaaatttatcgtaaaaacatttgacaaggacgacaaccttttgttagaattgacttacaaggttggggaggtatctagcatccagttggattgtggtcataaagataatccactcaaaaaacctggagtaggtaaggcttcagaagaacgtctgtctcgtattgcagaaagcgtttctccccaaaaatctaagaagaggactagaaaatgaaaaacttacgttttaacacttattactacaacacattgaatgatttgtattatattgttcgaagtaaaagtcctgaaacagtcctattctgccgcgaacctttcaaaggggaggaagtagagtctgagatgaatgttagccagatcacctctttgttgctctcaggcgcaatggaagaagcaatattctaaaccaggcaggagggttttatgaagcactattgcctgtctggtagaatgggtgcagattgtgattgggttttcttaaaacttgtcagcattcgagagttcatcccagaggaagagcaagaaagcgagctgatgtcatggatcaaccattacggtaacacttttcggcatgttaaggtagaagagttgccaagcgaggctgaattatgaaactttttgagtggtttaaaaagtttaaatataaagctgtagccatcgtgccgtggtccattcagtgggttgatgaaggtggtctaccgatacctggtgacaaagatactgggtactggattatgatggagaacgggtttggaaagcgaaagtatacgtgcacaaactctactcgatctgcacttaatagagtgcccggttacaaacttatggttgtgtggaaaatgtcaggcgtgcctccagccaatgctcaatttcttactgacaatccgaccacggtagagggagattgataatgaaaaagattaacagtagtgaagtagagtttaaacttgtcggaaaaggcacttactgggaagttcgtcaaaaggtatatttgttcggtcttattccctactggtctaaattctactggggagctaacgagttgggaagatatgccaccaaatcaatggcacttattggtatagcagagtacattgcagcccgagacagggttggaaccacttattactacactgctgacgatattcgtaacagtgtttacgtcccacaaccacctgatggagaccgttgatgaaagttaaagttttagattcaagcttctatattggtcaggagcctttagtaggaaaagtgtttactgctgtccctaacgaagattaccctgaccttttaaaaataaaaggagcagatcttattgccgctggtgcatctcaggaatgctttgacagtcagtggacctataactttgccctaggtgaggatgtagaggtagtggaggacgatcatgaaggttaaaattcttgattctaacgtctacttgggacaatccttcctgaatggaaaggtcgttcctgcggtatactttgaagggttgccgtgggatgatcctgtgcggcaacatcacagttatgtaggccacaacgtggtgtttatcttgggatcagacctgatcaccgctggtgcacctgaatattatttcggggaagagtcctactatgcctttggggtagggtcagatgcagatattgtagagctgtgatgggtaaccgttgtgaaaaataaactgtttaaagttacaatgaaaattcgcggggcttggagcgtaaagcaagggcgtattccagaatttgagaaagacttctacgtagtctccacctcggaggaggctgcatgctggcaggctggctatgcctatgcaagaacctggtacgaaggataccagactgggggctatgacggagaaattatcagcaagggtgtagaagaaattaatgtgttgacaagtgaaaaagtttttgttatagtgcatccagattccagagtgaagcattactggaatgccagaacaaaaacttggacaccgtttgcagattctgctacgccacttttaaaccagaaagctcttgactctgccccaagttatggggttgttgaagaaaagctaaactgaaacagtgaggtgtcaccatgatggatttaattctaaatattgataacgcaggagagtttaaagacgatggtgtaacaagcatggacaaaccctgctctgctaaggttgactcaaaatggacctacaagtttgacggagagaccttcgcaaatgatgagaaggttgtagatgctgcagccattttaaacgctctagggtacgaccctgtgaattctttgatcaaggatcctgttgagtttgcagagtatgttcgaaaaatggcagatcttgctgtggatattttaaaaactatcgacaacaagctgtaaaaactgttgacacaacgcttcagatttagtatcattgttttcaaagagagatagttattccctcttccttaaaaggaacacgttatgcaaattgaaatcactggcaacaatgtagaaatcacagaaggtatggtatcttttatttcccgcaaaatgtccaagctggagcgtttacatccctctgttaactatgcacgtgtgagtgtaaaagttgaaaatgatcaccaggaagttatggcgttcatttttgacaattctggaaaagaagttattgccaaggctaaaggcagtgatgcttacgaggcaactgaccgtatggtagatgttgcagcacgtcagctggctaaatgcggtggaaagaaaggtaaggggaaaggcaaagtaaagattgactttggagaatgaggtgctacaatgggtgtgattaagaaattagtcccaaatgtagagattgcatgctttgaaattatgtttgcaatcgcagttgtagttaatgtgttaggttacggctattaatatcaaataattgaggagacctctaaatgaaaattaaattattccaaactgagctggcagacaaaaattgtggactggttgaaggcatgattgttgaagcacaaccagtggactatatgaaggtggttcgtgatgccctaggtgaaggttttgatctgatggagccagctctgcgagaagatgttatcgagatggctaaaaagcacacacctgaaggtttggtggtgtttgttgcaccgggtaacggagaagagttgattgtaactcctgatgtgtatgagattgtagaggaataatcctgcttggattagcatacttcctcgctaaggaagatttgtaattatttgtgggaaaggagtcccaatctcttaccagaggtgatactatatgattgtttattttaaaacttcaggtggataccctgattctcaaagcttgatcggaaaaacgtgcacagcatactcacctcttgatgaggaggtaagcgatattttacgaaatatgtatcggattgacccccaagaagcctttgatcaaaaccttgtatttgtcaagggctcagatatgaagtctttgggagcattccctgaagcagatgatgatgccgtttattcgttcatgactccttttgaagctatggttgttgggtgataatatgaaagtacgctttattggtgaaacaattcctgtgcatctccggtcgcctgaggattctgcagatcttgcatctcaaaaggcgagaggttatgataagaaagtaacctcaaccgatgtagtgcttgaggctactagtctacctgaccctgctgcattctttaatcattatgggtactatttcagcaatctgatgaatatcggtgagcttgtgtttattagtggtggagaaattgttagcaagcttggcggcgatccggatatctttcatgaaacctgtccttttgcatttgtggtaggttcagatgtggaagttattgaggaggtgcggtaatggtaagcctataccgtgttgagtatagctcagatactgtatacaacgtaagaagcaaagatcgcagcgacagagtgcaagaaatgtatgttcttgccgacagtccgttatctgcagcgttcaaggcaggggctcttgcatctcgttggaaatttgaaggtggatctttctatgaagaaacccttgaagattctgttgttatttcttctgtagaggtttcagatgactacgaagggaaaaagttcgtaatgcggcacccacacagcaacattgcgtactactgggatgttctgaacaacgagtggaccccagatcttcagaaggctactgtgctaacaccgtttttggcagataagttcccaccagaaggtaatttatccgcactgtttcagtaattttcttgcacacaggtgttgacaacgccaaccctgtgtgaaataataccttcatcttaacaagacaggggaccgattgatgaagattaaattgaaaaaccttgaaacggcagagattcaggacggtgttgatttccgttctaaagatggtgacatcttagaggtaaatattccaacctacgagctgattaaaggttttggcaacgttccggaagaggatattacagaaattcttatgatgttgattcttgacggaactgtgtttgtaggtgaaggtgagaacgctattgcaatcccaggccatttttatgaagtagttgacgaagaggtgctgtaaatgaaagtagaaattaccggttttgatgtgaatgtggttccggaagatattttagctaaacttccagaaggttttggtaacggcgttgtggtggatgctgttcctcctaccaaagacattctgctgcagtatggtgtagcagaggaagatgtcgataaagttcttacaatgatggcaatcgatcgtgttgtcgttgttaaaggtctcgataattttgagagtgatcccctgattattcgtggagatgactacaaaatcatcgataatgaaggccaagagttctatgaaccttgtgcagaagatattcttaacttattactggaagcaggtaccgaagaggaggacgaataatgaagattgacccgttactgaaggctcgtgcagaaaaagcgtacaccattaagctgaccaacctggttcctacttgtcatccagatgtaggttggcctgaaggtctggtagaggggactgtaacagctgcatacctccctaacatcaaataccttatggaaatcttggagctggatgaggaaacggcagaagagttacagttggacatgaaacaaagtgggactctggttattcacgggtggtataatactaaagacgcagaagaccctcttgtaacttctaatctggcatatgaaatcttaggacctttgaacctgggggaagactaatgaaagatctggttaagattaagattaaagataccaacggcgaactcagccattttggaattaatgatggtgacgagctgatcgcacacctgcctaccaaggaagttgtaagcaaagcagttgccggagaagaagatgcaatgcaggctgcaggtgtggatgaaaactatgtagccatgtgcatgtgccgagaccaggttgttctgtataaagcgtatcgaccaaacggagccacggagtggcttgtattccgacccgaaggatatgaaatcttagaggcactatgataaatcttgccaaggttgcaacggcactgttaattatttgctggtcagtaaccttaacactgtgtcttgtatttcggtaaggtgcttatatgaacatcctgatgtgggttgtagcagtggcgtttgttgcatgtttttgctgctgggttgcggtgaggatttctgtagctacccttcggaagttggggttctcagagtgggatattaatatcctttcttttcgcaatgaaacaatctcagccgccctgctctgtaagaaattcaagtgggaaccttgcgaggtcatgaactatctaagaacgggagatatccctgaaagatttaaaaaagttcttgacgacaaggataaatgatagtatagtgactaacaagaggtgaggaatgactgattttactgaagctttaatgatggccttgtctgttttagcgctatcggtgtgttttggggcgttattcacatctctggttaaagttttacatacagtattattacccaaggagcgcagtaatgacgaagattgacttaaatgctggagaccatgttgttgtcaaatgcatcggagattatcttggattcacaatcggcaatacttacgaggcggtagtggcgaaggtttaccatgataaagtcctcagtcttgtatttgactgcgatgatgatggggatgaccgatacgtctgtgaggtgctggcacgagacgatagtgaagaccagaaattcctggttattgaactgaacggtatttttgtagaacgttaatttaaaacaacataaggagactctcactatggctaaatctaaagttgaactgttcacctctcttccttctgacactgcagagcgtgatcgccttcgcaaaacaatcgaagaactggtagaactccaacttcagattaaagatctgaaagatgccattaaggatatcattctcgttgagaagcaggatcacctgtattctcctaaattcatcaaatctctggtggctaccgagttcgatattcgctatgaggctgaaaaacgtcgcgctaaaatcgaagaagaggttgagcacatgtctgaggcagacattctgttcaaacgctctgtagaataatgacaaagaggggggcttgggcccctctttttactatctatgaaggagatttgagatgggtataccgattactgtaaaagagctaaatgaacgtgatgcaggtggtctatggcctgcacgaaaaatccgctgcgtctatatgaaagagaatcttgaacatcttgatcaacagataaaggtcggcgatattttcgaggtcttctattccaatcggcgcaactgggaaaccattcagccttctggttttgttcttgccaaacttgacactggagaagtgattatccctgggttggatattgtcttcgaaattatccaagagtgggatccggataagattagatacgaagaattattcggtaaaggtattatcaaacctgtgtgaggtggattatgtctacaaaggcggctaaatactcctatatgccatcaacctctgcagaggtagactttagtttcgatgtgtttccactgtttgaggtgattctggcatacccaacaatactatctactcctgaatcacttgtacctgttaagttgcagaacgctatgcattctatgcactacaacaataataaatgtaggcacagatggtgtcaggacgaggaaaaagatttggatagtttgagggattttgacagtcaccttttgacacctttcagctactccaaccttgataagccctcatgggtatagcaaaatatcaaatttaagacacctaggacgctctgtggcgtccttttctttatctggtgcacgattgcataccttggacagataatctcgttacagagcgtttaagagctttctacaaacaagtctctctttcgagcgtagcgagaacgcacgtccgttttgaccaaaatcaccatacgctcggattttaaccaaaccctcgcggcgtttctgttgacacattgccgctccagtgatagtatccacacatcgtttggagaatatgggatacacaatgaaaacattgtcagaggttttggtggtgatcctgatgatcattacgtccatagtggctgttgccggaatactcacgggtggaacatgatcaacacacatgcatctgaagagacatccgaaggagtgaccatatgtcccttggatgagccagttaaagaggaaaacttagattctgaggactattcatcttcgtcccagacagatcctgaggctgatgacctaacgtgggaagacatcgtagacatctggttctccattatgcctgagcacgaagagttcagaggtggtagactatgaagcaccgagcccacacaggttcctcatgctaaagcatggcctgaagaggcaaacgtgcataattcctgtgcattgtgacgtataaaacccgttcacactctcatttccagaggagatttcatgaagatagaaatatttggtggagctgacaacactcgtggcctgatttaccttgaattcgatgaatcatacctgccagaggtgttaaatataggctctgttgctgaggctttgggagtaaaccctaaagaactccactcttgtgctgagatcgatggttgggaagagaccatgaacattgatttcagtgaagtagaggatgaaccgcttgactgacacacaattagctgcccggctaaagtgctggaagcacctataacacatctttcaactaaatttcctaccaccacaatcacttacctcccacacatgactgtttgcttgtttagtgagcagtcatgccttgacattcttgcctatcctgataaaattaagttcttctcttttcttttaccgagtaattcgggttttctgttctcttcggtttgaaggggtatggagatacacctgagtgaacagggtgaacaaccgaacatttggctatggcattagcatggcgaagcggacgggtgacgaaagaggggccggaggacaccagtcactgccatatgatatatgggtgataacctgaagagtctgaataagtgtttaagtaccagtcagaggaaaaggtgaatggtagccgaagggggaggggggtttcttgtatctttaatttgtatattatgtatacactcgtaaaccaatctcatctgaatctgtttaccacacaaagtagatagggacaaatatcacctattaaacttgaattatttatagaaaataccacaacaccacttaagtctttgattttacacacaaatcctacagatattcaacctctatatttaacatattcataacatattccatactctacctgtctgatcaatttacccaaccacatcctccatattttccctgtctgtactacccctgccccgccgggagtcccgtcatatctggctttccagcaaatatcacacccacaaatatcattacctgaagagggtttcatcccataatacctgccttacctgaagagcgcttcatataccccgtaaattttttaattgaccccctccccgccgccggaggggtcggcttttcccacacaggcctgaagagtcagccagaaatatctgaacaggtccagttataccacgattttgacctgaccgacaggagtgctgccaggcggacgaaatgggaatcattctcattcttataacaattctcaaatatcgaggcagtgaggcaaattaataggtgaggccgttcacacaatggcacaacatttgcaacctatcttgtgggagtgaatgagaatacctatcattgtgagaatagttatcattacgggcaatttaacataatacccattatgcgcaccactggcgatccatacagggattgataacatgagttaccgtttacgcacataacaattatatttcttactatttgtgtgggatatagttagcagccaatagattagatattaacctgcggacttctgaccgtccagacgtctaaacgcccacacaacaagggttatacatacacaactgaatgtaaacagggccgcaaaaatgctaccataccagtttgtaaattttcatgcagcacttgacaaagaggagaaaaacttgtctgacaccttatacactttcgacacaataacgactgttattatttcatgtttcactgttcacgtatagattgttcccgcatagactgtttacgcctggatagtttacaccttaactgtttacacagataggataagccatgacattcgtttgcatgaaaacaattagcaagttaacaattaacaagttaataatatatgacataatataaaagcagggcaactattagcagatctatagttgccttgcttgttatgtcatgattaactgaatacaaggcaactatgatctgattaatagattgcagacaaactatcacgggggtgatggttactgcttttatattatgtcgcgactccgtcgcgccatgccattcgtttgcatagttgccttattgttacgaataaaacaattgcattgttaatgatttcttatctttctcttagtcatctaatgattacagtcagtatagttatgtacagtaaacattagacgactaaagatttctctgtttattataacttaccattacaatttcggactgtttaccaagaatgttgacacataagctgatttatgttatgcagtttacacgaataattattttatgcaggtattgactattccgttattctatggttggaataaatacttagcagactatagaatggtgagcgtacgtaaattctgagatctggcggctatagttatactcgatttttcacgtagaacacgcttttgtggttgtgtaagtgtatgacttataaagatttttagttgttgacaagacactgaagatatgcatcaggttaaattttgtgcaatagctgcattacgtgcacttttgggagagaaaacgggtaaaaatgggcctgctaccacacaatgaaagattatgcaatagttattttccatgtatatttgtacagtatgtggaattgatggctagtcaattattccacttgccaggtagggccgtttatggtaggagaagagcagacaaaaagaaaggggcctttaagccccttgataattcagttaagaaattataatgattcgtatatttcaaaaatccgatttgccaggtcgttacggtagcggaatttttcctcacgtttgatcatcagatctttaaagccatattctttaagcacttcattaactttatggcggcataccttcatattatcttgagcgtcaccaataaacttgttgctgtggtgcattgctttaatttcttcttccaggaccagggcaaccacccggaccggatcaagctggtaggcggtaacatcgatgcggcattgtagacggcttttaacgtctgccaccggatatactgcaacctcttccccgtcaacattgacaataactagtttaccatcgatttcgaatcctttcgccgccggaccgtgacaaaaagcgttatcaaagctatatgccggattattagatttaatgttcatggtgtttttacctcttagttaattttcttacaacttcccttcaaaaagaatatagcaaaactgccgatccttgtcaaccaaggatagcataatttttatgtgatcaaggggctttattgccccctgatcgtgcaacttgttgtattatttgttgctcatccagttttcccaggctgcctgataatctgcctcactgcggcggatctcttcttgctcttcaagtcggatctcttcttccaggtaccccagtatatcggcttttttggtctggcgtaacatccaatcatcttttttacgggtaaagatcttatatgctttctcgcaaacctcttttttgctacctttttggacttcaagaactttgtaggccatgtactgaactagtttgagctgatcaagacgtttcatgatgtttacctctttatgcggttctgattagtgggccttttggcccgtgtcattatcttattacttatggcggcagaattcaagcgtttttaattgataatcttcctcagcctggagtacgaccgcctcgatcatttcgttggcattgttaaagccataacctttagcgaaatcatccgcgccaccttcgtgatcatgttctgcgttcatcgcttccacaaaatggaattcaagattattgaggtaagggcttgatgttccgtcctctttttcgatgagatcccaaatagcattaaaacgtgattcgacttcttgattaatccagcttgacataatgttttcctcccttctggttgttgtgtgggcacttttgccccttcaagataatgttaccccaccccctggcagatgtcaacggtttttatagttcttatatgataggcaggcccggtgattgtctccccccgtcgccaggtgcctgccgtgtaataagtataacaaaaaacaggaccattgcaagccctgttttgtagtttataaatattatattttttcgcctatgtagtccggtcggtttttctctgtcatgcgcttaagcaattcttgcatgttgcttatggcttgtagtgtatcctcttcaagggatgaatcaagataatcaggatcattcttcaccttgcaatgattatgataacgcagtaccgccagtacttttttaacttcttccgctgtcattatcgcgcctaaaacaatgagttaatatataacaccagatcgctgactaccaggacaacattaatcagcacatacctaaccataaagggaaagatcgccaacattgccgccacgatccccatggtaataattatctttctcatggttaacggttcacgtaagttttcccgttcacggttatgggcagatcctccaggtctggatcttccttaaggtcgcgagcaagctcaccgcaccggataccctcgaatccgtagtactctgttgtgccgtccttaaaagttttagcggcaaggcataagcgataagtaaccccgatttgattgacggcatgaatatccgttagattaacctcttttgccagctctttagccattacaggcgcattaagtccaacaaccagggtaaccactgcgatcatctttttcattgtgtctatcctctttctgctacgtttaaggcggcggtaaccgcctgtttatgctttgttggttaattttcaggtatctgtgtaaattaaactatgctgtacgctcaactataacaacggtttgggggatctccccttccaccactagtaaggcctttttctgcgtgatagatatctttacccgttgcagcgtggcggtgaagtctttcatttcgtcacgcggtgttttagtgcagtaccagatctcaggcttgccgatctgtaagttgcgtaaaaattccgttttgcctgttttgttagtgatcatttgccaacctcacccgataccgttggaagacaagatcatattagacatggttgcaatcaggccaatacccagggcaataaccaagatcactgcatcgattaatttctgtttcatggtgtttattctcttctgttagtaaccttattcatggggccgctaccacagccccagggtaaggcagctatgtgcttttagtgtttcattccaaccatcgcggcacggatcgccgtagtgctgtacttgaagccgtccggggtcttatcttgtccggttagctccagaaaaagcatcatatcccgcgccgcatcattacgattagcattggcgttaataaagccttgggccaaccggtacaatgactcatcgttattaatccaaaggcttacattccaatgagttttgtttttgtaaccgttataacctttattgcttttcatgatgtttacctcttctttgttccaggtggcggaccattccaccgccttatgtattatgctttgtaagatggctgttgtcaaactattttaacgataatcatcgtacgctttattaacctggcggatataacattcaaaagccagatcaatagatttatattcacggatatactcaccataggaaaccacatacatttctatagcttcctcatatgcgaggagaatagaatctaagcctacgatctcagtctttgcaataatagccatgatttttatcctctttgtagttggtggggttcgttgccccctctgatttatatattacagtcttatatggtcatgtcaactattttcaaaaaatttttctgctgtgatattcttcccggtagggttcgctactttcaaaattttatcatgcactggacgcccaaaagaataagcgccgtacacagtaaaccaataatcgccgtcaggttgtactattactgccgcatatggtacgcctttttcgtttttgctgacaaaatagatcacgttgccattaatagcctcggcgcgtttaatttgttccatcatgatgatttgcctctctttattttcataattgggggccttttcggccccgccaggtttatttattgatagcgtgcagcgggaaagctacgccaggttgataaataacctttacaacctcatcaggacaaaagaagttgcagaactcaccgcaataggcctcatcctctttcaactcttcatcaacatactcaaaaaagtagtcgatgcttggataatcctggccgtgattatagtcaaccatcgttaataataactcttgatcattccgtaggatgtgcatacccgcttttaagtattttgcttccatttctactacatcgccagcggtaataatagccatgattttaactcctatctatctggtcaacgattgggggcctccccctcgacaactcttattatccatattgtcgggaatgatgcaagtacttctttaaaaattttttaagcgccccgtatgccgttgtaacgccaaaataataaaggccatgcaaccgcatggcctttatgtgattatattgctgcaggccctgctaggggccttattttgcattcttgcctgtattgccgccacggtaccagcgtttgcggtgaaaatggtaataatcaccctcggcattaaacatcagatgattttcaataaccagcttacgaaggtgggccggatcttgttccattcttgccagattccggcggctgttacgtaagcgtataaattccatattcaggccgttgattgcagcatggatgtcaaagtaaccgcctttgagacgttcacgcatggcgttaagctcaacacaatatacagatttctcacaaatcaaggcattagctagggcgcggacctgggcaagggggttaagctcattaaggtaatatagtttgactttcataaaatcgcctgctgaaattagtttgagaaaacatcgttcacaatagcgatcacaatgccgcccaccttgtcacggtcaacaatgcacaaatcaccatggatcatgcggtagtctggatgatctttcacagaatagtcaataagtgttttcttgtcgtccagcttcgtaacttccattctcataacgatatgagaatcatcaaaggcattattccgaaaagtcatagcctgaccgccagggcacccggtgatctccacttccacaccatctacgatctgaccatcaaagaaataaagattattagcctggataaacatgtctatcactccttgttaactgcgtagtattttaacagggtttaaatttactttattgatggccctggagtcaaggccatctaaaaataaattttacaggcctacaatctctttgattcgttttactgctgcctcagcgccttgggggtagaaattatggtaaccgatcacgcgagtgatactaatcgcagtttgatgatcttcataatagcccttgaagatttcttgaccgtcaatcagcacggcaattttttcttcttttttgaagttaataacgcggatattgttgctcattttgtttctcctttctggtttttgtgttggtggggattagctccccgttgattattattatccatatttcggaccggattgcaacaccccggaagaaaaattttttgaaaaagttaggcccccagggatcgggggccgttatcagttacttacagcgataaaatacatccctacgcctaacaatatttcaagggcgatgatctcaagccataccataacccggcgcaccttatcggtgcggggcttatccttggttgtcatcgtctccccctttcatcctggtagtagtgacgtggtttacaatggcccccaggagtaccatcaccacgcacatcacaagaaaaattatctctgtcgttgttcgatccattgttataaaattccttaagatcaggcctgaaaataaagcgttcgttattgaatccatcacgccaggcggctggcttcaaatcttcatcaaagggattaattaacgtggtattatttaaacggctggcccacatattttctattcctctcaaataggcgatccgcctcagttaaacaaatctcatgggcgtgatctctggttttagcttcatcgaaaacctgttgtgcaaggctgcagcgtagggagactggaagatcactataataggcgttgacaaatgtttgcgcgtcatacaggtcggaaaatactttaccctttctattatcgcctttgtcaacaattgcaaggataacaagtacaatagttgcaaccacccccaggaaaatagatataataaaccataaaaaggcggatctacccatcttgccagcgatccaggcgttaaacaaggcaactaatacggccaaaataataaattccattctatgtacctcttttgcagttctgtttaacaataaggcggcaaatatgccgcctgttacctgattaaaaattatcgccgtaaatctttccgctttctgcccacaccaccacgcggggcatactatcccacacgtcttgttttagattgagcgcgtgcaattcttcagtggtgcccataccaggcacgggctgattgtatactgcaaaacgaccacctgcataatcataggccagggttaaatcacactgaatcatctttttgatcatggcgttgagcatagcgttagccgcatactggtcacgttttaaaggcaactctttgattagtttgcgatagttttcaatgtgatcgcacactgtttcacgtggaagatctttcatatcctcgcgaaaggtaaccaggttaaacataacggtgtcaatagctttagtagtgtttttcataatgttttcctctttgttttgtgtggggcaaacgtcttgccccccttgagttttaatatagcaggtttttagattattgcaacactttatttatgaaaaactcatctctccatattcatccacatcaaaccgccaatcattggcctcaataaggccgatcaggttttcggtagtgaactgttctagataggcctcctccaggtctacgtaaaccttgcgggatagctcccgtaccgtctcggtgatcagctcttccaggtcttccactttgttttcttgtttggcggtcagatctagccaggtggtatcaatgtatccgcttacagtgttttcatggctgtaatggctgtacttgtcgcgttcaacactggctgataactcgccatcgtgcattgtgccgaacaagtgacgaattgatcggaacttggtcagggcctttactttacgcaaaaatttttctaaatccacgttttcagcactgattgacgcgccgtcaccctggcaccaaaagccggaccaatgtactttggtatcttcaaggccgtactctggaaagatatattctttgtagtgttcaattacactttctgcaaaaaagtcatccccgctgtgttcttctctttcgcgtaccatttcaatggctttttctttttgttcgtcggtcagcacgtcgaaagataaattgtaacctgtggtaatgttaacggtggtcatgatattttctcctgttttctttgttagtggcggtaagttttcccgcctgtgtgtttaattatacttattgagatttacttgtcaacactattttttaaattattgtggcgcaaaatgtttaaaatctcctcaacgtcatcaacacggcggcaatttttaaacgctaccaattgccccatgattttaatcactgggcggccttgccagtgcccctggagaaagcgcgccttgactttatcggtggaactatcacgccaccaaatggccttgttgttgcagtagtaaaaattattcaggacaacatcaactttatcaaaattttttaatttacgcatggcgtttacgcctttctctctttgatgtggttagtatagctaacctgtttaagatgtcaagctttaaataaaatcactgtcaatgatatttttaacgccataaaacggccctaagcgatgttttcaggttaaaggggggcgattgcataggtggggcctttttggcgcttacagggccaaccaggggcgctattcgtaggatagaaataaaaagccccgcacaatggcggggcgttggttgttatttgtctttatggcggtatcgttctgcctgtcgttcacgttccaaaagtaggccaggcaatttacgatcataatgatttcgccagatctttccaaatctttttggcttattcagtttattgttacgctggcgtcgttccggcagctcttcggaatcatgagatcgctttacaatcttctcaaaattaatcttcatatattccccccttgctaacttcaatattggcctgaatcgcccggatacgccgttttataacctcctgatccttgcaatcatatccccaaaagtctacgatttttgcgcctccagcctttaggcggtatagtgtttcttgcatcttgtaagccgggatcggtcgcggtgttacctggtctcctttctcatccttgtacttgataatatagtcttcattgtcgttgaatacccaaaatgggtattctgtgagcgcgttgctctctttctcgtttttagattggatcttgtttacaattaaagccgtagcaatagcgccaataataaaactagccccgctgatcatgttactttctcctttcatggtgttaataaactatctttatagatggccctgccaccagggccaccgaaaaaacagcttatttgacaataccgacaaaacagatcccaccttccccaacataggcgatgtcggtaaccttataattggttaagatctgcttatttagttcattaataaaatcggtcatcgcgttggtgtagttgtcttccatgtctagggaataatcccaggtgtaaacctttttacgtccgaagccttttaccatgatacgggcgcttttggtgttggtaggggcgtaatatttggtaattagtgcggccatggttttaactcctatgcattagttcagtgttaacagtataaagtttactttattgatggccctggtgtcaaggccatctaaaaataatcttactcgttttcttccagctccgcaagctcttcttttgcttcttccaactctgtctgtaattcctggtattcttcatcgtcctcaatatccaggctgtcgatgtagtcgctaaatccgcagcggtaagcgataggatctagctccttgaggatacgcgacggaagaaaagaaatgtttccgatcataatttcgccgtagatctcgtctaaccattcatcatagttttcgtcgtacttgtcctcgtcgatttcaaagttatcgatcttgttctcaaggtctgcgatctgttttttcagcgcggcgatctgcatagctttatctgcggcggtcatagtagtcatggtgttttctccttttgtgtgttctgggaagttttcccgtttatgtggttagtatactgatctaagttagcttgtcaattaaaagtttaagaaaaattttgcgataccgttggcgctacccatcaacatttgcgccaggatgtaaccaatgatgcaaacgataatagttacctttgtgtgctggcgtgtagtactcatctttaagccccctttccgctcaactgtggttagtttactttattgatggccctggagtcaaggccatctaaaaataaactcagtaagttttcagtactttcccgtccaatctgtcaagctggatctcgatagctgcagaaaacctattataaaccacatcgcccatggagtccagccaatctatgacgttatacacctgctctttattcttgcaagtccggatccgtttcattacgtaagacggatcaatattagtgctctcgttgttgtggtcatgcgcctggcctgctgcattagctatagattttacaaccacctgaaagggctttaaggtgccttttgcgttcatctcacgcgcttttgcggcgcggttgttatatgttacacaacggcggcaaatgttgaccaaatgcatatcaataattttttcatcgtttgccagttcgttcatgatgcggcgtacgttcttattcatgatctttttcctttgtgttggcgggaaacattcccgccttttgtgtctagtttactttaattttgcagcgtgtcaataatttttttattcgtgggcacatgttacaatgtgctttttatagcctaggtggttagcaagtgccgacaaaaactcttcttcatagatccagccgttggcagtgatccccatagcatttaatgcgctctcaagtgctgcgttagctttatcataaccgtgaccgctcgccttgccgccagtataaccgtacttattgttcttgttgtcgtgcatccaaaaaacgcagtagttagtgttaccgctggcggcggcatagtaccggatctccgctacttcgtgcaaattattatcatcgtccaggccaaccagattataagccttgtaaaatccacgatcacggcggcagttcttgacatcagaaaaagagaagtcggcattatcaaaattaaaggtagtggttttcatgattttatcctcttagtgtcttttgcgatttcagtatattttgtgtcagaccatatgtcaacattattttttattaaaccagtggttgatctgaccttttgtcagggcgcaacggttaagctgttgcagggtatagctatgaccgcgacgaaatttataaaggccttgcccgttgttgatggttacatccacccggcaaatcacttgattggtgaccacctggcgagtgttgcgacgtactttaattccgtaggcgttcatgattttttatcctctctgttaattggtgtggtgttgttcaccttgcgaggataagaataacaagaactgtccgagctgtcaaccattagttaaaattatttttgggtagaattctccagccgccgcccctgccaggttaaccatcattttttcgtactcttctttatgttccaacgctcccgccatagccttttcaaccagggcgatagcctcagcgtcattaatagctacattttccagggggatcatattaccttccatttttgtacctcctcttcaattgttacctatcctatagcataggcccaccaggtttgcaagccttcattatctcctacctggtcagttaggccctgccaggctggccccgccaggttgcagcggtcagcgcatcaggttagaattttttttttgaaaagtgttgacagcggccccgccaggtggcaaaatatacctatcgaaaggacggcaggcaccggtgacgggggagacaaccaccggggatgggcgctgcatgaaatgagaacgattatcattatcgtctaaaaatttatgcaaaaacttcttgctttctttgtcctgtgtgttactataataacaagccggggcagtaggggccgggagacaatcaccgggcctgcccgttattctgcaaacgagaatgattatcattcaaaattctaaatgagaactcctcgcatttaataaatttaattagcacgctaattaccctccgtaacaatttcctataaaatagtatccactaaaatattcccatatagaaattttaaaaatccatttctgaaaacgaaaaatcgatttcgtccccaaaaatttcaggccaagagccggagcgatttccagaaaatccgattcagaaaacgaaaaacagatcaagtactgagaaatttatcgagaaaaattttcagaaaatccaagccctgaaatgaaaagtagatcgagtacctggaaagctgcaccgcaacttcaagatagtggttagattgttaccatagaaggtcaagggtaagtggaggaagttctagtagagggaggttagcatgtgtgggaaatctataatggtggcctggaatatggtgcaaacgataggatgagttattcagcttgtcgcgcctactctgaaaaatccattttagttttcgatccattttctgattttctaagaattttaaaatatctggcccggtgaaatatcaaaaggaggaaatccattttagaaatcccccttatacttgatatgccaggaattttcaagtatcagctgtctttgtttttaggtttgtacatgcgcagaggtatggtctttgtaacattccatttcctcaacccttcccagctccagttgtgggcgtgatacccggttatgcatgcactgctggcgtgatcataagcataagagaacgctatgtgcaccaggtggggccagtccttccacggctgtggaccgtaagcctttctccaacaccgacacaaactaattgtctcaagaatagggagaataacaattccatataccaccaccagaatggtcagtgcaatgattgtcaggaacacataccctgcagttgaaatgatgatctctgtcatttgtcgtcccctttcttacgaatatagatgtgagagcctgcctgtatataaatttctcgaccatcctctgcaaagatatgaaatacacgatcaccttcgtactcgatacgagatatcttcataatggtctttccacctgggatacggatctcgtcccccacagcgatgttccatgcagatttaagcttaaacatctgcaccctcctttgggaacttgaactctggcatagccatatacgctacaacagggttgtgatcaaagtagaactgaccgttaattatcccggttttgtccacatagttaccagatcctgcaagaacaacctcgcaagctccgaaatccacattgccatcctcatcagccatggctacgatatactttccaagaggcatgtttttaacgccgtctacaaatgtccactctgtgttcatactttacccttaaggtagccagtaaacaatctcgcctttcagcttcatatcgtttccaacataaatttcccagccatccatcttagcaactgtaggcccaaagtcatccgcaccccttacctctttccaggctccgtagtcaggttgccagatatagaatccaccttctttgtcccatgctccgtacactacgtttaacaggtttcccattgcaacaatggtgggccgtgggaataatacatctacagatgcgccacaatttcgggtatcttttaagttgcaatcccaaaagatgtctgccagtgtggcggcgatagctttacgtctttccaaagttaccatggcacgatactcacttgttgttaagaagttctaaaactttctgttttactttatcaagatctgttgattcaaaaactgtgcgatatccccaactttgcccgtaggagtgactgcaatccccgtagcaccattgctcaatttgatagtattcaaggaaggggtgctgtctaactatgataccatcccggttaaaaattaccataatacatcactctctgttagtttatgcatatattatacactgcagttttcagatgtcaatcttttacaggttactccagtataatcggcatttacattttgggcaatgaggttcttttatgtaataaccatcagtctttggaacactttttggtgcagttttaagattgtaccgagtaaaacaccggaagcaggttacctctccaacctgttgatcgtttatccactcgccagagtaaagctctctcttgtttctcataattctctcccaaatcctctgcaatcttataccaaaatctccagccagaaagcacacgggaacattttgatgattgaatctttacctggttcagtagttctttttccgtatggtaggtagaaatacactcctgcagattcgaacacagccccttcggtcgtatctatcacagccagaattaagattttagtctccacagcgctctcctctcttagtcgttgtggaaactatatcacctcagaagatggtcgtcaacactttttatactctactacaaccacatcaatatctgcagttgcaagattaattacatcttctacgtgttcccactttagaccgccaataccgcatccgattttaggaatgtagaacggcaatgacacacctttgaatacctcgttgactcgctcaaaacctttcattattgagaagtattcagcattgggccctgggtagaactgggtatacaggttgattccatatacgaccctgttcttggcaaaatgctcccaacaagaaaacatacccagcttgtccagattaccataggcagtctctttgtcggctgccagtgcttgagggaactcacgggcaatatctttcgctatgcctgcacccattgtatgaaagcagttacaaccgtggatcaggtgaccagcaccgctcttaaaaagggagattaaatctccacctacagtatcaataatcacggtatgtcagctcctcttccgcaatttcaaaaaactcatcccaaccttgtggcatatttgagttgccgaagtggctttcatagtaaaggttctcaccacttgggagatagaaatctgttacctcgtagaatccacaatcgtcgcactcgccttcttcaaacttggcctcaaccttaatacctaggaaggtgaaaagtttatggatatcttcagtttcgaactcccagcagatattgttttccgcatcggtgtagaactggatcagcagaccattatccagtttaccaaaatattctgtgaagtaactaccttcccagaaatctttatgacaaataatatccatgcgcttgcccatgataaaggtgtgggcgttttgggcatcgtcacgaatcagttttggcatttcatagatcatcttagttctccgggttcaacaggtggtggtgctacaggaagatcataaaacatggctatcacagtctcttacacaggaattgcttcaaatagaccgttatctataccgtccttcagatagagattatattctatgtcggtatctgtataaagggcagcatccagcattctatctgtgagtccatccattgggtggagaaaccaccacccacgccagtcaaagtaacagcctggtgcatcttctcttacacggattcgataaatcatgggcagtggtctcctgttagttatacatcccagttttcttcgttcatcgcgtcctcccgttttatgaagttataattgcacacctttcaacctgtgtcaacagaaaacttcaacaaattcttccacagttttaatgtcatgggaaaaaggtttacggctataacgggcaatagcactatcaaccaccgcccgatactcaagatcttcagaatatttcatgaagcattgcagcgtctctgggcagatagctaaatagctccaccacccttcttcagattggtagtcgaatcccatactttccaaccatgaagcatatactcctgcaccctcaagccagtgagtattttcatccagaaacttgttaatagacatgtgagcttctaagcatttatccagctcttttccgttaaccagccacgcactgaccgtggcgcatccaaggtctacagattgagttgacaggttgtattggtcatagttctcaggtttaacaatgatatcttctaatgtcatttttcagatctccttatacaaaaatgccccaccctttcgggcagggctatgttaactaggtgctaaaagtattcgtagaggtatccatcgggggctggaattttttcatgaatgtagtaatcaacacatattccggtttctcttctacaagaattgtgggatacccattctttaagaacgtttccattcatgtccagcctccttacatttttacaccgtctaccgctggtgcttctatgcaatagaatatcctccgtctgcttgtctttattttctccccaggtcgttaaacggatattatcaaaagagtaccctttgaaatcatctatcctgtcacaagaaggctttttccttttgtcgtatccgctggctacccactgatcatacaactctttgtaaccgttcaggtatagccactccttaaactcttttttggtgtaagtcggaggcgggtgacctctttgcttgctgttgcacttttgagccttgtacagcacgcgtattacacctttttctgaagagtcgtgggaaaattggtcagcctccctgctggccttcttgcaacactctttgcacttattaagatgaccgtcagacatctttgggtgtttgtagaactcggagaggtttttcacctctccgcacttgatgcacctcttacaatgcgtggattctacttttgccatattgcaaacccaccggagcgaaaggtatgtcatcacagaactcatactgtgctggattctgatccattgggtcatcttcctcatcatttacaggaggagcgtctacagtgttttgctgtggagctgcttcctgtttggcagcctgaggttcttgatggtcagtggactcagcaccgttcttgatccaatcgtacaacggctcagccagattagtcaagacatcttttgcttctgcagtaattgccgctgcaaaatcatcaactttcgttttcttgtcaatacggcgacaagcgttcaacaccgcattaccgacactggcacctacttcatcttcagttcggttggtggcttgagcatactctttcttaagctcaatagtgactacgtgtagtgttttagccactcctagtgggtcgtctaccttaaacccgcgatccaggatgatttgcaacgcattgatgctatgccccgtttccacaccgatagggtcgtaagaggatttacgcttgccaccagagccttgagtaccgttctctgccttaggaggataggctttgaaaccactgataatgtttccggtgtctttgtcaacaatggctgcaacacgaccacctaccaccaggtctttaagctgctcatcagttacaaccatagcaccttcgccaatcttgtggtcattaacagtaaccacgttgccaacaatctgagtcacatcaccatagatgcgtaaaacgtcctgattggcattctgctgaggtttctgcttctggccttgtgattgtgcaccttgttgctgtttttgctgctgagtcgctgctggagcctctcctgcacccagcttaaccatcttagccagtgagcctttgtagtaggtcttaccgttatgctcgtttgccttcaaagggatatttacgatccatcctggcgttacggtttcccacttgtcatcaattttaacagagacagagtcttgatgacccggtttaagcagcttatcgcccatactgatccaaacttcttcaccaccttgaagtaggttatcagaggaatccagttcagaaatcagtaaagagatggtgtggctggactcaattttcttaccttgccacacagtggttttaatacctgttgtaggatcagcacctttgataggcttgatgctgacgcgtttaatcatgccgtgagccagtaaaacagtttcacgcggattcatcgggttagcgaattgttgaataacgctcattctttgtctccttgttcttcgttagtgtttgccgtgtgtgcaaaccctgcttgaattaatttgtcctgaacttgagccaacaggcccattgcaaaacttgtggtcccagagagggccatcaacatatctcgttgttgagctacccaacctaaggcatagtccaaacgacgatatttttcttcttcacgcagagcctgaaataattgttcagcctccggttgttgtgtgagctcctgaagtcttcccatgaaagaagaaagcactagcaaaagagacacttgatctttacttaaccctaagaaaaattcttgaggttgttcttgctcgttcatcgcaaccgactcttgatcgttcatttgttccattatggaatctccgattttatttgaacaacatagaaggagacactattttagcatccccttctgtaaattacaataggtatttgttagccaatcacttcgaaagttccccaattcccgtccagcaggcaggtgatcggatccccatcgtcgtcaaagatttcaaagttttcagcatccaggatgtggccctcgaacacaatactttcgtcgccaccgccagagataacagcatattccttgccttgagtcaagttttgacaccctttgccaccaaaacctacttcaacacaacgtactttctgtcctgcgcgagcaactgcttcagtcatcttaaggtctcctgatattaatcgtcaagttcaaaatagattttaacagcttcatcaaagattggaatcccgatgttgttgataagctgccaaactaccatatctttacctgggtctgggagaatgtcaacctttctccatgcgctgtatatccagtttggaccaccttctgcactaactggcagattttcaccagcctcctgcagatacttatacagcaaaagatattctggatactctagaacactgtcctctgtagtatatagcagttcacggtatacttttaagaaccctgctggggtgatgttttcagtcttcatttgctgcttctcctgcattcatcagatctgccatagcgtcacccacgaagagaacaaccacatcgttgaccgcgtcagcatcatctttgttgacgttgctgaatttaggacacacagcaataatcatatagacaccgttaccaacctgaactgtccgtgtggtgcacatcatggctgtatttgtaccttctttgaaagcgaatccttgaagacgctcctccaaagtgttaccggtagatttcagaagcgccagctcgtccaaggcatagatgatatctccggaagttagtgttgccttgccatcagacaccataatcactccatcagcaccgtcaagcttagaggcttcaaagatatcgatatcccaaatatttttcatcacgcttcctcgtcgtctaaggagttgaagatttcaccgaaatattctaagacttctagctctcgtgtggtgcagaaaacacagtcaccgttgtcatcctcgataacggcctctttacccagcacatctacttcaagtttatcgttcaacaggacggcccctgtgtaaactttgtcagctgtgcagtcccgaaaagcagagtccttctctagatagtctggcttaaccttggctttaattcgttgatattgtttggtcattgctgtggtcccctttcgttttgataggaccattgtattaggtcctatcgctgttgtcaagtattaatgttcagtttttacaaaaactacttcgttaacagtgcaccagacagagtctccttcatcatctttaaaggtaaggcactgtgctgagttttccagctcatcaagctcttcttgtgatagaggggccccttcttccaaaagggcttttaccaaagggttctcacaaaactctgcttcataagtagcgccaagtgtgcaatctttaaaagctcggtcgtttgcaacgcattctggtttcaacatgattttcatcttagaggtctccttaattatttaacaatcaatactctgtttgtgaggagtatcttacatctaaccttacttcttgtcaacgactattttcaatcagccacacagggtctaggtaaatttgttggcgtgttgcccaatgacaaacttcattgtacatctgaatctctttgtccgtcagttcacgaataggctcatctataccctcatttttgtggtaatcccagtcggcatcgatctcccacaaccacgacttgttgtcaccacgcttacgcacacagaagtcaccgggacggcctgccaatgcatttaagaactcgttctccgctcgctcctgaagaatactaaggagcaaaacgttggagcatgaccgtaaaatatgcttcagctcacaatcatcaatctcaacttcaatacgttgtttgactgtgtgggtaccttttactaacatcctacctcctctaaacgaactctgcaagagttgtgttgttcactgcaccgcagtaaatggagtatcccagcccattagagtgcagaaaccacggcgtgccgaaattatctttcacgtagacatcgccgttgtttgtaaagggccaatattcttcaccaagggtaaaatacctattcataccttcagcaagatactttactttcataggtcctcttcaacaactacaaacttggcaagcaaagtggttccgtagatatgatactcaccgtttgccaggtgagagatataccagtcaaccccttcctcgtctttaatcattttgtttgcacgagctttatcgtaataaacctcgtaggtctttccttctttaaagaatgacatgtctgtcatcttttcttctacaaaggtggctttaaccaaagtcgtcattgatcggtctccttcttgttaagtctgaatactgcaataatagcattcccaaggtgcagtgtcaagtcatttccaagataccacagcatcccacggtcatctttaatgaaagggtaacaatctggtgccttccagacattgtacactttcccaacctgaaagaaatcaggccctgttgggattttggtgccaggccacacttgagatacctgaacacactccacctgcataataacagggatagtcatggatgtaaatgtttttgttggttctactaccataaaagtctcctctttgctcaacaacacttccatgtgttgatagtttacattagtgacaatcaccccaattacgaccacacaagtattcacctgtgatctggaacgggacgcccatcattttagaagcttgccagaagcaatgcaccaccatttcacccacagggctccagataagttcaagctttccgtcatcattcaggataggatcgtacaccgtgtttccgtctctgtcaaccacttcgtttccgtcctcatccttgcgtgcctttttgtacttatgaccgtcgaacacatgaagtttggcctcctgctctgccttaaatgcttccagttcttcgattgtgtcgaaggtgtacacagtcttatacttcggtgtgtcagggacttgaagttggtactcatccaatagttcaggtaggtcgttaagctaccccgcaccattacgtgcacagccatacagtttcctgtatggatcggactatctcactaccttgttaccaaggcacctcccatttcgaccgcacttgctggcctactctactcgcttcttcgcaccaatttatgttggcgctatgctttcgatagtctctgaacgttactaccaggtgtagtttttagagatatgtttccactgtcttctttgctttatggctctgaccgtctcataagggtacccaagatccctaatctcgcattgtcgtagaccactctgtaacagttcgcaaatctccgttacctcatcctcggtcagcacagcgttggcattatactcaccgactggccttactctgaggtcattatcataagcgtgtttgatatttcccccaggggtggtccattcaaggttccagtatgcattgttgtatttgtttccgtccttatggttcacccatgtgagcctttcaggatcagggtttgatacaaagcattcggcaaccaagtggtggacaccttttgtgcactgcttcccttcgatgaacatggttacgcaaaggtaacctcgaccattatcaaaacaaaacattgttgtatgatcacgtttcgataaaggtattgttccatcatcaaacacggtatatccgtgataatcaactgatctagccattttaactacacccctttagtcttcgctgcggattagcatattgagcttttaccatgtttaggtgtaaaagtcaacttagccttcccgtcaattaaagaggttttcgacgtgcatcactgcacgaagccacaatgttatttatggtaatagataatacgacggacaccttcatcgtaccacccacgcttcaccatttggtggtgcatgagtatcccaactaagtcacacaacgatgcaccaccattctgttggtatgcattaagtaaagagtgtttagatcgggtccagatagcatgaccatcaaaagagtagataaacttcttacccgttgcttcccagaatttctccagatcttctttacgccccttaagaccagggttggcatcccagagtgcatcgattaccctttgtcccaactctggagagatgtccagcatatctgcaactttatctttttgtgccccatacataaccccatacgtgataggtttaccgtcgttacgagacacctctctacctgctacttttgtatatgcctcagcattgttttggtgtgcgtccccgttacttacaacatcgtaatacaggccgttgtcgaactcaaaggcaccccaagccccgataagctgctctaagttggacccgtcaataccgatctcaaagtatcctggaggaacaccccacagactacgcatctctttacccataaccactttaggagatggtttaggcatgtttgcacaaatgctgtgtttctgtctggaagtgtttgttaatccggagcttttagcaggaagcttatggtcaatcttcaagcgtgggtgattaagaagaccagtatcaaccttatcctccttgattggatcaaggaccgatctgcggtttcgcaatgataaccacaagacgatatctttagccatctctccgttcaatttttcaagattcggacataggtgtccaaacgtatctttcagttgcggagaagtaataagtgccctagcttttctacgtattttcccgaatacttcctttttaatcctttcggagttaggaaagcttcggaacttgtgtactgttgtctgaaacttagcatcagttttgttccagaagttgataattaggtcacaatactctgactctaaaagctcgtccatatatgcatatactcgtgcatcaacatctgcatcaggtaaagctttcttcttgctgtctttagttacatctttagttctccacattgttgggagccaaccagcactgattaggtatcgcttgatgtcgtcctgattgctgattttcataggtatcttgcagtcaggcattcgcttctgctgcagatcacttattgcctgatccatcagctctttaggtaagggttgtggtgtggaggtgcccttaatatagcctctcaagaaatcagccatcttatcggggtctttgcagcccatctcttcacaccattttatccccatcttgctgacatctcctgtagaggtaaatgctcgcttaggcggggctttgaactctaaagcactcatgtccacagggtagccaagcttgtcttttaaccatttccaaccattattggagattgtcccatcctggttaaacggcttttcagggaacttaggccgctgagacattgataactcttttaaaggaagttgtggttcaacacgatcagcgatctctttcatccacgcatcgcagcggtcacgtaaagcaatagccccatctatgtcgaaatacacaccctgtcgagcctgcagctccatcaggaaatgctgcagcatgcctcggcgtaatgcattcttccaggtaatcttcttgaaccctttcggcttctctttggctggatcgtacataaagttctgcatgtcagatttgccgtagaatacaccttttgattccgctaccagctctttccagagcagctcctggatgataacgtcctcgaatacacgatcaacatacttccacagaggtaaatttctccagtcatcaattttaaccttctggtttcctaaagcgtacccccacgccattaggccatgaggacctacctgctgcatacgttttgtaacaggattgtatacagaatcagggcatcctttaggtaacggtctgtcgggccatagtatacgactcattggcagagtgtcgaacaggttcacctgatgattattgattgtccccatacacttgggatcacggaacatatcaaaatgaataccagacagcttctccatcaagataaagtcataactaaaacagttgtgacaacttaatgatgtgggtgaccaatcggagttcccggttaaccaccattcaagctggctgaaatccgcaatacggacagagcagctaggatagatatcttgctttgccagcataaattgttttgctttttcaacctcctcttcactgtaatgagatctatcattgataggcaaaaacaacataaaattatttttattcaactctttaaacaggccacaatggtagtaaagatcttcctcgtccagaagacctgaggcctcaaagtcaaaattccacatactcatagtataaacgttctccttaaaggggaggcggttgtactacccctcccactctttgttaaacattaaaaaggcgtttcatcatcctcaaaaccagggaccgggtcagaggatggatcatcgtactggaggtcttcctgcgtgtcaacaggcttaacagtaggagttacaaccttatcagccacaaccttgcccataggtgtttctacaactgcatgctcctgatcctcaaacatagcctgaggtctccaaacaacctccccaccttctccgtctgtaaacatttgcatttctttgtcccagtaccaattactggcatcatggaacttacctgtgtgcgggtccataaccaaagtgtcagcaatacctagagtttttgctggacggtttttaagacctaccagacggacacgtccacgagaacgatccaccatttcttcggcctcgacacctatgactacccaactcaactgttcaagccccgccgatcctcgcaaattctcttttcgcacaggataccagaaaggtaacgggttaccatccttgtccttaggaggcacaatctctgtacgtttgaggtgagcgatcaccaagataaacacgttaaactgcttacaaaacgcagccagctgagtcatagccatgtccagttcttttcgctcatccttaacattaagccctgaaattaccatggacaggtgatccagcacaatataacggcaatggtacaggcaaaccatttgcttaagcttggtaatcaactcgtccaccggaatagatccgaaatgtttgaacactttgatttttccagcttttgcccatgattggtgaatctctgcgtgttcttgatcagttaaaaactggctaggatcttcaacaaactctttaacatcaaaccctaactggtttgcatacaaggagttaattgcttcctctgggtcctcctcaagatggatcatacatagacgatcatcctcttcatagtcatcagccttcgggcatgtcgggtccattaggtatcttgcaatacaatgttccagttttttagctacagttgttttaccgccccctgatggccctgtaagcattacgagtgtccctttgtgcaagccttttagcattttttgcagttttgggaactctgcgctgatatctaccccgttggaagtctttttccgcaaagactcgatagagaagtcttctaaatccgacacagcatcaggcacatatttaacagggtgccggaacatgttgacaatatcttccagctttttagccttcagcatgtcacggatatcttttaccccgtcagggtcatttacttcaccagggtattctacgtggtaaacgttatcagccatcaaaaatgctgcgatattgtgcgtggcctcaacacctttaatgacgtgtttttgcttctctacctcgttagctgcatcgttatccattgccagcacaactgttccatagctacggataaacttctcattgtttgcaaaagtatctactgcgtttgcacatccacagttaattccaacaaaaggcaggcagggttttcctgccagatcaccaccgttgataactgcgtcgatcccgtcctggacctctttagcccactgcttcacctttgccggggctttagcgttggtgagaatcccttttacttgtatctgatatgcagcctgccatgctgcaataacatcaccttctccctcacaaacgttaatctgcttacggttgttggaagatgcacacagcttttgaccaaacatctgggagttggcctttacgatgccaacaacggagaagtggcccctttgttctttaggaatagtccagtcacgctttttgaaaccggacagatttccgtagcggtcgtaatatgggaaatatgttgcagtgactgtcacaccgtcttcttgtgacaatgctgatcgcacaccaaaatattgtgcagccatcagaccgatattttgttgtgggacagggacaattttagtattttctaaaacagtctctacagtttcaacctctttttcatcacgatagtctcgtttcacacttcccccacttttatacttagttgctttcgggtttggctcaccgaaacggttgtatgcagatgccataaatttacttcccattaattctgctccttactacaggctcgtttgctaagaatacggcttttgcccagccacgtggcgtgaggcttcggatcatcttcgttcttgcactctttccacccagcttggcgtgttgcatggaatacccgctaaccgcgtcaactatttgcgggacaggttttgtggccgggattataaatccattgcctatccagccgcaagttatttttggataggcatcacgtggagctataaattcaggaaaccaggggtttacatcatcctccggtaaatacccaccataatccgaaggatgaaaacggtaatcaggttttcgccacagtgtggacataacccctacaggattctctacatgccacgggcaatcgtaaatctctcccaactcttccgcaacccgagcatcctttacagcattaatttggatcaaaggatccttagccagctttttcttaaaatgtgcagcacctgataccgctaaatgcgtgcacggaggaaatgcaagaataaagtctggagctggatacatgcaaaaagtttcctgagggaaccatgggtcaatccaataatccacatagtgaatgttaggatgatcggttatcacctctgcataactgccgtggtcagcaccttctgcattaaagcacaggcacaggtacccagcttttgcccagtcaataactgcaccaccagacccgtcaaatagactccacacaacacctttgtggtagtgttctttgtagatgaatttcaatttgctgtctcctaatgcaaaaagccccaccctttcgggcagggcctagtgttaaacccggatacctattgtatactcggtggataccaatgtcaaatctaaatttaaaatttcttgcatctcataatatgcgtccagggttaggtacatttccccatccttttctacatacttgtccaagtgcttgaggcatttcggataactatcaagtgcagctttcaggcactcaaactctgtgctgtttatgaatccttccatcttggctacccgttctggggtaatgatagcactgtagtgagatttagcttcctgaatgcaatgggtccaagcatcaaccttctcttcgaaaagtccaaagaacttctttttggtgagcttcagattctttaagtgcttaagcactcggttgccgattacagccacatcacgaaacttaagaatcactttgtcgatatcctcgcgacctattttcacaaaacaggccttacacatttcaggggaggaataaccaactttccacataaaatctgacataccaccttctccttattccttaaaagctatgatatcataggaacttgcagatgattctggtgaagaatgactccagtccaggtcatcagaatagtcagcgtactgtgcgccactacgcagtttgtattttacccacttacctggtgcagggttttcaccaccttcccatacttcccagccttctggcaggccgtcctgagcgtagtcatccacctcactaatgatcttagggtttggcaccaagatccccgcaggctcttccttccggataagtgtccacacagcgtatgtgtctgagcaggcgcatgatagcaaagtatatccactattcagaacttctgcaagctctttttcagcatcttccaatttggttaagtggtattggataatcttcacacctgtaatcatcagaaacctcccacttcttcagcaaatgcagctgctgtcgtcgctgcatccagataggactctagttcacgggctgcacgtttgtaaattgagtggcgcatatcgtttggcagttggtggaagtccacctcttcaccgttgtggtaaacacgcacatcggtaatttgtctaaacccgtaatagtcaacatcagagtcacggcactccgagtctggcaactggacaactgcctgagcttccacagtaaacatatcgtcaagttcgaaatcgatttcaaaagtgtatggtttataacgtttcatcgtttagtgcttccttagtttttgtggggaggagtgcctcccctttatactcacatcttactactcaaggtcttcagagtcaagctcaaaaagaatcaaactgtgcatgcctgcagagagatcaacacaccctgcaacaataagggtttgatagtaaggttcagcaccctcaatgtcttcgttaaaatccacaacaaggtagtcacctttgttaaaggtgtatttgtccgatgtaaacgcaaaacctgcccagtcccctactgcaggatctttatcggtcacctttgttagcagtagatctttttcacgagatcttttagtaaaatcgtgaatcacaacatccttctcttcaggagttggattgccgcacacgtagttaacgatatttctccacaaactcatacgtccccctcttctgctctggtttcaaaatctttcctgacaattttgtctaagtcagggaatgttgtattgtaaaactctacgactcgcgggtcaacaataatgtcaacttctcttagtggacgcaacaagtttattccttgtattgtcttaactctactcaaagcgacatacgtcatcccaggagagaaagctccgttctttccaaggtctaggttgtaacaatctagtgtaagtccttgacttttatgagatgttacggcgtacccagatttcagaggaagttgcctgtatgacccaatcactaccctctctataaacttctccatcttcctttctgcaatgttgtatctctgagatggcttatactcgttattctcccacaacctctgctctatgtcaacctgtgttccatcttcaagctctaccaccaccgccttgttcttaaatttaacaattgtggcacgtgttccgttaacataataaggtactttgtgcgtcgggtcaacatcgttggcggttatcataactttcatgccaattttcaacttcatctcctgctcaactggcagggtggagggaaacttacccttcatttcaccagtgtataccttctctggggcgttgatggcatcatagaaccttctgttcacttcctctgcttgtttgttggtggcgcaaattgtgagagcgtctgttggtacacctcctttgtaacagcgagcattaagttctgctacaacctcttttatgcgacgaccctcacgaacacagttgagcattgtagcaaatcgaatagactcctgtcggaactgatctattagggctatgttgtggaggtcaagctctttccaagattcggtatagcaacacaggtccgtatggtagaagttgaagtaggcttccttctccatagaagagacaacaggaggtgcctggtaaaaatcgccaaacaatatgacctgtatgcctccgaaaggtttgtcattttttcgaaggaagcggagtttcctatccatctctataaacttatcagcacggatcatagagatttcatcgataattaggatggtaaatgccttgcttttcaaaggctttgctgtttttgcccttattgcggtccagtctgactccatgctcacacctgctgcaagatcgaaggttcggtgtgctgttgctccattaacgtttaaagcggctacccctgtcggggcaaccgttatgcaagagtctccatacatcgactggatcatgttgatgagatacgtcttcccacaacctgcaggtcctgaaacgaagacattctcaccgctcatgattgcaacgagggcagcatctgtgcctacatcatactgccctttttccattacgcctcctcgtaaagaatgtcgatagtgttaccgtcacgatcaactacatattcaatagggtctccatctttgcgtgcttccggagctaccacaatctcatagcggcatgcacggcacttggcgctattgtgttggtatggcacactaaccacatctgcagggtcaaccatgacagtcattacagtgccgtagctctttgcatactctttgctggcgcagtgtaagccataggagcacgcagcttccggatcatcctctacaaagttacgaggcatggatacaaaagcaccctggtattgtggaactttaccactgtgccaatctacccacttgctgccgttaaactgaacccctttgtagcaaatgattcgaccatcttctgcaatctggatatcgttggcctgcataaaatcgtagagcatgtttacagattttgcagaaggattgcgtagcaggcgaacgaggaatttcacatagcggtcatccagcgttccgtctgcataatctttctcaattttctttgcaatggtggatcgcatctctacaccgtagtagtagagcttaccatctttcatgatcaggttgtctgcaagtgtggtgaactcattcttgcgttccagccagacaaggatttcaccaattgcctcatcatattcctgaacagagatatggtcgaagactttctggtaaacttcctcactttcgctgcggcgaatttcaaaaatgccttcgttgcaggtgatctggaggagttcctcacaaataactactaaaggctcgatgcttcgagtctgttgctgagacacactgctcaccacctccagcaccgggtctttgacttctactaaaggttcttctgacttgattgccaccccagtgaaccccacaccgtgaacaacacacagtgggtataccacgccccaacgtttaacggaaccttcgcctaagtctaagatcatggcgtacttaccattatcttccagcccatatcgaaatagacgggcctcttcacgggtttcaaaatcctcacgggtgtagcagacgctgtcacggtcaggatcgaacaactctggggcaccaactgccagtgtccaggttgtgtcgcctttctcaatggcacatgtgaaacccttcttctcaagttctgcacggcggtcgcgtgcttctttacgagttttgaagtgttcgtagatgaaaatcataactgtctc

SEQ ID NO: 11 - DNA, 154769 bp, bacteriophage
gtaataaataaaacgggtactatacgaggacttcttatgacagaagacattttgttaaaactctatgatcgtctggataacgaattagcaacattgcggggtgaagttctctatttgtctaaatgcaatacagatctgcttaagcagattgcagaaagggatgaccaaataaaatccctttcaggtgcattacgtgatcgcgacaaggcattagagattttacagcgtgttaccaataaggaagaattaaaagacttcttacatggttatgctcatgctatcgatctataataaaaaagcccgtcaatgacgggcttaattttaatatgtatcagctaatttaattatgttatcaagttccgtgattggtaaagtttctgtgtatccatctttcaacatggatttatcaacaacgccacaatgataagttctctttatttccttttcaagttcccacggaatcctgccatcaacactttgtttgacgtaaacaagtttgtgaacaaacttagatttctgcatatgttgtttcattctggtttccggtaattcattggttacaccaaactttataaatttatcatctaacgtctggatataaaaatatcccatctcagatggacgatagccagaagaactacatttcggacaccctttagcatttctattgaacgtacaatatcttacagaaaattctgcgtcatgttttgtacatttaagttttatccatgaatttgcagtacctatccattcaccatcgacacctatatattcataccctaactttttacatttatcttctattctagatagtgcatcttccacgggaacgacatattccgtcttaaattgttcagccgcacatttcttacaaccacatgtaccatgatttttaaaatcaaagaactttgtattcttccaaatatggtcatgtttcttgcatctaagaatcatcttagtaacttgtgatttccagccaccaacaaatcccaaaaattcataatcaagatctttacatttttcttcaatgaatttggttgcttcctcttctgtcataactcccctacattgagggcaaccaacaataacctttttagcatagaaactattactggaaacatcatagacagttccatgcttattgcattggataacagatctagtcaattttcctttccattctccagaaaatcctaagaatgtatggtcgacaagtttacacctttcaataactttatccgcaaattctctaggagattttgttaccttgtttactctgtattctattttttccggttgacgaagataataaacgtggggattgctccccacggaattaatattaagcatccttccacaccttccttgcatcatagtttttacctttagaaacaaatttatatgtgttaaggtagataatattgctccagtctttcgggctaatctcaacaagttttgttttaatgtgtcccggtagatatgctttgatcatgtgatcacttccacgcataccttttacatcgctccatttgatttttaagcgtgttttattgctcaaggtaggagtagatgcatattgctttaaaagtgcttccagaaactgctgacgggctttaggtgttacatagtgtaagttaagacccagcattacagtattacccgcctttgtcttagaatcacccagacaaatgatcagcgggaaaacatcccaatatggcaaagtgtctttatacttcgcatcatacataaaggtatagattcgccctacttgcggttttacaatctggtgtccctttattcccgcttttattgttttagtaaaccactcctgtgatttttctttaggacgactctttgatacagcacgcatagacgcacgaaaatcattaatcatcatcattgcgcgttgctgcttattgagaccctttgcacctttcccttttagtttttcaacttctaatgctgttttaatttcgctggcataacgagacatacttttagtgaaagtcgcataggctattcccttagaatctgcaaatgctttagctgtcatgcctttggcttttgctttcgcaaattctacacccaattcgacccactgtttagactttcttttttggggagacggcttttcgtcttctgtgattatttcaaatacgctcataatattatcctctatttgttaagccctttaaagccaaacactttctttaatgcatgttcggtgatgatcttaaactccatgttatgcttttggcataatttcacggcagctaaccatttttcagtattttttgtgtatgtccatacttcatgcatatatcgttgctttgtcttcgcggtcattctttttggcttttccggtggccttgtctctttagctggtttaacttcccataaatgctccttgccatcatcaaacttaacgtaaaaatccataaagtatctgtgtctttttccgtctgttgatgactcataaggaattactacggtctcagatccccattttgcaactctaggattgcggtctagccactgcatgatccatctttcccagcttgaacggtatgtgattttacgtatatcccctttatacttttccttattctcaggaacatacttgcccttataagtgttagatcctcccattttagcaccctttattataaatacataatactatttatcaattgagggtgataaaatgctcttttctttcttccctgccattgaatacaacggcaagatgattactgacattgtgcgcaattaccgcgcatatttcaacgcaataatttctgattataacatacaaacatattacattcaaggtagtccacgaccggaacaagttgcatatgaagtatacggaaaccaacaactttattggatcttgctgatgcttaatgacgtatacgatccgttccatgactggatcaccgatcaagagacagcatatgaatcagccgaacaacgatatgcaaacgtaggaggaaatcaagtattataccacgttgatattgacggaaacaagtattggaatcttaccgaatatccgaaaggatcaagcaattggtatgataaaggggatattcatcaccgttatttgcagtttcagggtgcattatcggcagtagacacactggaagatgcgatcctccgtaatgaggaacgacgcaagatcaagatcatagatcctacacaaattaaacaatttattaacgcattcattcgagaaatggaaaaggctgatgtgtaaggtgattaattatgctaatgtttaataactccgttaaatggtttaccggaattgtagaaaacagggaagacccattaatgctggggcgtgttcaggttaggattcatggtatacatccctcgctatccgcacacggtgacattcaaggtcttccaaccgaagatctattatggattacgccagtacaagatattacaagcgcggcgatctccggtataggtcaaagccctactggtattgttgaaggttcaatggtatttggtttggctttagatgaacgttatttaaactgcgttattctgggtactattgccggacaatatacagagaaaccactcactacagaaggtttttgcgacccttctggtgcatatcctcgttatattggtaatgatgttaatattcttgctcgtggcggtattaacccagaaaccggacaaacaacaaaacctgatagtgtctatattcgagatgaaaacactggagttgcagtaaatccagacgacgagccattagaccaaattccggttgatgataatcctgattttacaatagaaaaaatgctgcggggcgatgaggggtatcgcgagaaatggtatcttgattcagaaggatatccgacaataggcatcggtcatttgatcatttataagaaaaccagtgatcttggtattatcaataatgaactttctaagctggtagggcgtgaagttacaaacggaagacttacagccgaagaagttagtaaagtatttgctgacgatatagaaaagactcgtcgtgatatgcgcaaacatccacgaattgcacctgtctataataaatgtaatgcctcacgtcgtatggcattagaaaatatggcgtttcaaatgggtgttggtggattgggtaaatttaagaatagtcttgctgcgatgttagcggaagaatggaaacaagcctatgatggattacgtcaatctgtatgggctaatcaaactccaggacggtcaagccgtgtttctaaaattattttaactggtaacttagaatcatatggcgtaattgctccaaagaaagaggaatcaatttctgatgatccgcgagcacgtttgagaaatgcccgtattgctgcctataagacgcagagagcagaagaagacccagaagcaccgtttaccccacaagacacacgaatcatgtttaaagagcctaagagttcgtattctgcaaggtatccatataaccatgtatacgagtcagagagcggtcatattatcgagattgatgatactccgtctcatgagcgatatcatcgtaaacatccttcgggtacatttgaagaaaccagaccggacggaacgagggtagaaaagatcgaaggtgatgattatctgatcgttaaacaaggccggaaagtaaacgttaagggtaatttgcaagttgttgttgaaggtgacgcgcaagtttattatatgggtaatgtgatacaaaccgttgatggtaacgtcactgaatttattcgtggtaatgttaatcagaccgttgaaggtactgctaacatgcatgttgtaggtgatgttatcgcacagcttgacgctaatttgacggctaatgtcaagggtaatgctgaattaatgatcgagggtaacactaccgaaacaattaaaggtaactatgatttaaccgttgagggtaattttaatatgaccgtcaatggcactaaatcagatcaggttaatggtgactggtcccgtaattgtggtgcaagcgttaaagatattgcatctggtacagttaaaattgatggtagccgtattgatcttgggtgaggtaactaatggttgaaattcttccgatgagttcaaaattggaggatatcagcgagcgagaaatctttgaggtggtgttctcttataaagcaacgccaccggatgcaaataccacatacacgattaaagagtttaagataagcgagtatcgccctaataagggcgttaccgttgaagaaactaaaatatctggtgagtatagggatagtttttcgcttggcgcggattctcttaaatatataacgaaagatagaattaaaaaatctgccggaagttttgatgatttaccagatccaactaccgcagatctatattattttaacgctcctacacgtctacaggaggtttatacttataaagtcaccctaacctatatccaatctgtttcagagtcttctggtggttctggtgaaggaaatagtggtggttccaatatccgagagggtgctggtgaaactaatccgcctccggtagtaaccgcacacacaatagagaaagtttatactcaaaccgtttttggaaattgggatgtgtggagtaaacagttaagagattatgtacataggggtgtttaatggctggcgggtgtcgatgccccgccgtcataaatagttatataatgatttaatatgaggtgttttatgattaaagtgcatgacgatttcaaagaactttataatgtatgctctgaacgtttttattatgatgaaacgagcggaacaattagacgaaaatatgattgtaagagcaatcattataaagcgggtgatgtagtaggatataaaagaaaacaaaaaagaacaaatagtgaagatgatgtgttctatctgtttactaagattgatggagtttcttattcaattcaacaaattgtcttcttgcttaccgaagggtatatacccaattgcatcgatcacattaacagagacacactagataatcaccgtgaaaatcttcgtgatgcatcgcgaagcggaaatgctcgcaataaatgcaaggtatataaaaatggtttcgcctcttccgattacattggtgtgtctaagcggggttctggatttaggtgtcgtattagaatagaccatgttattgcatatgatgaaacgttcgaaaatgaaacatctgctgcatatgcatataacgtagaatgtataaaattaggtgtcagtgaatataccaactttaataaatttgaagacgaagaatctgttaggaaactttacgaaaaagagaaagaaaataaagagtttcaagaatattggaagggaacacataaacagggtaaacgatggggtgctaaagttaagagtgtgcgtttgggtacattcgaaacaagggaagaagctagactagctataattcgctacaaagaggggttttgatggctggtttatcatatgacaaagcaaaaactactggacatggtaattacggtccgacaataattaatgcaactcaatctaaggtatttgttgagggtatccctgtattagtcgaaggagacccaattacaccacatacaaaaacaacaaagccttatgatacacacgggggaactacggtcgccagtaccccgaaagtatttgttaccggaaagaaagcaattcaaatggcagatcgtattagctgtggcgataccgtcgctatggcatcaccgaaggtattcataaaatgacaaagcaaaagattacacaaattcctgatatttttaatgctgctacattcgatgaaattaaaagcgcattaacagactggatgagaaaccaggaagaatttaaagattttgattttaatggtgctggtattaacgtattgatggacttgctcgcatataacactctgtatattcagcaattcgccaacgccgctctatatgaatcttttatcagaacggcaattaagcgtagttcagttgttcaagccgcgcaagatttaggatatttgccagcaagtaaaactagtgcatcgactacaattatgttgcacgtatcccatccgcgaaatccggcaagtattcgaatcccacgaggaactaaatttattgcaagtgtggatcgccagacgtcttacccgtttgtgactacagaagacgttgtgagtgttttaggttcaaatggtttatatacgcctatgcttaaagtcgcacaaggtcgtattgttcgtacagaaatgttatttgatccgaagaaacaaattctgatccgtgatcctgatattgaccgcgctcaggttaaattgtgggtagatggtgctgaatggaaagactggacgcgagaaagcattgttaatgcaactggcgctagtaatattttctatatgcgtgaaaccgtagacggccatacagaaatcttctttggtgaaggtgaatcaactttatctgctgctggtggggcgctggaagcaaattatattggtgggcttaagccgtcaactggtgctaatattgttatcgaatatatcagcacgaagggcgcggaagcaaacggttcagttaattttacatatgcggatacccttgcatctatctctattgttaaaattattgagaatccgacaaatgatcgtgattatgtcggcgcagatggtggtggtgatcctgaatcaatcgaacgtatccgtgaacttgctccggtaatgcgtgaatctcagcgtcgttgtgttactgcttccgactatgaggcttttgtgtctagccggtttggtagtattgttcaggcggtacaatgtttcaccgaccgagaaaaaccgggttatgcttttgttgcggttaagcctaaatctggcttgcgcttgacaactgttcaaaaagaagatatgcgggattatctggcaaaatataatcttgcccctatcactccgagcatcattgaccctaactatctgtatattaaacagaatattaaagtttcctattcaatcaatgacttgtcagaatcagagcagtggttgcgcggtgcggttattgatcagattgatgcatattataccgacgaagtggaaatttttaaccagacctttagtaagtctaaaatgcttgcgcgtattgacaaagctgatgtatctgtgataggttctagtgcagaaatcgagatggtgcgagagatcgacaacttctataaagcaccgatggctggaatcaagtttttaaaccagtataagagcggaatcaagtctagttcgttcaacttcgaaaaggacggtaaacaatacccgatccattatgtaagtacagaaatgaaaaaagaatccggtttagctaaattgctggttggacctttccctgttggttctgcaatcgctttaccgcactattccggcactgattttgataaagaggttatcgacggtgcggacctatactttgaggttggagaggttcagcattatgaagaccttatttcatgggatctgggtaaactgaatatcaatagcgatcgctttactggttcatatattgagttgacagctaaaccgattgctgataacatttttactaaagacggttctttgatcgtgtttgaaaacgatctccgtcctcagtacacaactattagtctggaggcaattgctcaatgattaaagcgcctagtgtaactagcttgacaatagaaaaattgtctgctaatcaggcgtatatcacatgggatgacgtaggcgaaaacttcttttattttgtggagttagccgaaaccagaacacgagacggggagatcatccccgtcgatgagttaagctgggtaaacctgggatatactgccgaacaaaactggtttgaggataaaaacctttttccagaatattattacaagtttcgtgtagcagtagccgcagaaggatttgaacaaagtaaatgggttgaaacagaagagtttcagacatttaaaacaaacgcatataatttttctatgatgcgagagttcaaccttgcaaatgagtttataaaggaaaaatttacatacgataatcgagagtatgtcaagtttaataccgaccttattcaagcatcattgatgaaggaagattttgtctttagtcctgaatatgcaaacatgacaaatatctcaaactacattgtagttgatgagaactttcatgaaatacaggatcacatagaaaaagtttgtactgatataaaccgcactatgttagcggaaatgaacggtgttttgtaccttttcgaacggttccagccgatcgtgaaagtgtcaaatgataaaggtcaatcatggaaagcatacaaggcttttaatgatcgtgtcggcaatccggtttcccgtacatgcgtttatcagtctaagactactacttacgttttaggatatgaccgtatcttttacggacgacaagcgagcgatactcgatggagcgcggatgatgttcgatttagtgatgatacgatcacttttgcaaaggttggtgacgaaaacgacttagggtttgacgttgaggtctttggtgtattttccagattaacaggtgataccacaaaatacgccgaagctatggcgtgcagtgatgactatttgtgggttggtgctaaagatgttattcgccggattcgtcttaagaatactccagttgataccgtacagggttcgcctacgtttggcgaaaaaatattcgatcctgatgttatccgagtaacaggaaatgataaagctgtcattcagaaaatggatgttatcgacggtaaattgcttgtatttgttacgggtgaagttaaacagcgttatcaagatccgactaaacctgaaaacgttgtcccatcagacgatgcgggtgtatacttaattgggagtgatggcctgtcttttcagcgtgtatttggtaatactccgcaagaaagagaatatattcagcacggatttagtaatatgtcaacaaacggtgatgaggtgttcataagccattataatcatcacttcgaaagcattttaccagatccagaaactgccgcgaaatatgaattgggcgaagctgtaaaatattctcaggagccaacttatctaactgataagaaaatacatcaaactactttcagagcaagttatgatgatttgcgtgtttgggagttaggaccgcaagcgtattataatgaggccgactatacatggatgcgtcgaaatggtgttcgtgtgtggatcacaaatgataatcgcccgttggttgtttatccagaggttatctatactcaagaagttgatacatctggcattcttgaccaaaatagggttaaccgagaagtttatgataaagggaccgtgacctgttatcttaacaatgttaaatttgaaggattcaaacaatatgcatccggtgtaatgttccataaaaacacaggagagatcataggattctatcaatttaactatcgcgttcgtgatcaggttggtgtatattggaaacctacaaatgtagcatttgttgctgaattgcaaaatcaggttcgagaggttccctgggttccggttcactacgatcgagagcaagatccagatttgcggcctttactgaataagatgacccctgatagctttttacttgagaacgaaaatttcagaaaattctctgaatattatctgcaattcttaagcgatggttcaggaacatattataataaactaaaaaatctgattaaaaacaaatatccacgcgagaaagatgcatatgagtatctttggtcagagatgaacaaacgaaacatctatgcagataaaaacaagcgagatgcggtagtaagattctttgaatcccgcaaatcagatttttattccactaagggcgtggaggcttcttataagttcttgtttaagttactttataatgaagatgtggaaattgaggttgaatcacaagccggactagagtatgatattgttgttagttcaacgaacattgacgaggatatcgtaggtcgcacgatttatactccaaccggacgggctaacgtgacgtatcttgaaagggaatatgaaggtggtcgcctacgctggcgagtaaccattcataacctgatcgggcggttcgaagaaggacaagtgatcaaatcagagaaaacagcgtttgaagggatgatccttgttggtgtacgtggtaaagagttgttgagtagttcaatcgactatatcaaccgctcacgaagccaatacaccatgaagattaaaagtgcattgccagtttcgcgctatgcaaatgatgtaatgcgattcgttcatcctgtcggctttgggtttatcggtgttaccctgcttacgatgttcattaacagcgggttgagcatgaagcacaccgagacgataattcaatctctgaaaaattataagtttgacagcggatttcctagcgtgtatcctgatcgggtggcagaccttgacgttgacggaaacattaagaaagacccgcttaccggaaaagcattatatttgacttcacctttaatcggtgatgaatttccggttcctcctgaatatgatcaggagaacagcgaattgttccacggacttaaagcaagcgaacgaagatttgcaatgagtccactgtttgaccagtcggcggtaacattctctatgttccgtgagcttgtggataaacggttgaaggataatatagggaatccacgcgatccgaagaatccgacacagaggaaaattaatggctaatgaaaatagtgtgatctatcgctcaatcattactagcaaattcagaacagaaaaacttctgaacttctataattctgtaggcgatggggcaaatcaaattacaatttatggaacgtttggacgttcggagccgtggtcagaaaacgaaaaagaggtgggctttgccccaccttatccgaccgattcaacggctggtgttgttgacatgtggacccatatgatgggggcggttaagattaacaaatcacttcttgatgcggttatccctcgtaaagattggggtgataccggacaggataacccgcgcacgttctttatcaatgacattgttgtcgtaaactcagcaccatataaccgaactgatgttggtagcggctggatggtgtatcgcgtaaccgatgttcctgatcgcggttactgctcgatttcaagcattgacgctaaagtagagtgtttgaagttgggcggaaagtggacacccactcatgaatcaattgcgccacctgtaggaaagggcgattctattgatatgggtgacggatatcgttgggaatatctgtacacaattccacctgatgcggcgatcaaccgttgcaccaatgaacatattgttgtaccgttccccgatgaactgcgacaagatccggcgcgttggggctatgacaatgtgatcacctggtataatgactataatctgctttatcggctgaaagtagtaactttgcgttttcaggcttatatggactctgcgcaattcccaactaccgcgttagtgggtaatactggtttccgtcagttaagcattatccttaacccattggaaaagaaagcacgccctagcgatccagacgttaaagcggttaaagataagtaccgaccgcaagacttagagccacactcaggcgaaatgatctacatggaaaaccgacaacctatcgttcggtcattagatcaaacagaacttgtttctgtattgtttgagttctaagtgtatgattttaaaagccaattcgagagagttggctttttccatttttggtgttgacaatcttatttggtaaggtataatacacacatctaaacaacggaggataaattatggcacgtcgtaaatttacagataattgtgaagcaattcaggtatccccttgcggttgggatgtgatcgcgaacggtgaaaagatcggagagatcatcgatcatactcattcatcattagccgattacaccgatgaactatgggagggtatcaacttcatgaatgacactaaacgattcaagactatcgacgaagctatctattttgtgtataatccaactttcggtatgtggggaactagaaaatggcacgcgtaaatattaaattgcattacacaatgaataaagctaagttcccaatgcaaaagcattactatggtctacgtgcacaagatcctaaactctatggtactcattggttttgtaaacatgataaccaatggcacacatacgaagaaatgcacgagatgatgaaacagggtattgaatttagttattctaattatgaccatcgtataacttgcattcgaaaattgaaacgatggattcgtaagaatccgcaatttaaaaactttgtgttctttatgtctcatgtttatttgggacatagcgttaccgtcacagcaaaggttaaataatggcacgactttctaaacaagaacaaaaattacacgatcgggtgatggagttgattaattcagatcgcccattgacatatgaagaaaaagaattttgctataataactatcatggagatggtctaggcggttcaggtgcattctttaccccagaagggcttgcatgggattttaccatcgatgcacattgcactgatccaacaaattataagttctttaaagatagtgacaatattcgcacgcggtatatgcggttaaagaacttgcgaagggcgaatattaaaactcagtatacccctgaaatgatcgcggagtggaaacgatgccgtaaagatattgtatatttcgcagaaacctattgcgcaattacacacatcgactacggtacaatcaaagtacaattgcgtgattatcagaaagatatgcttaagatcatgcatgaaaaccgcatgagcgcacataaactcagtcgtcagctagggaaaactaccgctgtagcaatattccttgctcactacgtttgctttaataaagacaaagcggtaggtatactggcacacaaaggatcaatggcagttgaggttctagaacgtactaaacaagcaattgaactattaccagacttcttacagcctggtattgttgaatggaacaagaaatcaattgttcttgaaaacggatcaagtattggtgcttatgcgtcgtctcccgatgctgtgcgtggtaactcgttctcgtttatctacattgacgaatgcgcatttattcaaaactggaccgattgtttccttgcaatccaaccagtaatttcttccggtcgtgaatctaaaatgatcatgaccacgactccgaacgggcttaatcacttttatgatatctggcaatcggctattgatggtaaaagcggttatgtaccttatgaggcggtttggcattctgttaaagaacgtctttacaataaagctgatatattcgatgatggttatgagtggtcatctcaggcgatcgccggatctagtcttgagcaattcttacaggaacataacgctgaatttttcggtagttccggtactctgatcagggcaaccacactatcaagattatcctttattgacgttgttaatgataacgggttttatcagtttgagaaaccgaaagaaggtagaaaatatgttgctacactagattgctcagaaggtcgaggacaggactatcatgcattgcaaatcattgatattactgaatttccttataagcaggttgcagtatatcacagcaatactacgtcacattttatattaccggatattgtctttaaatatctcatgatgtataacgaatgtccagtttatatcgagctaaatagtacgggtgtatctattgctaagtctcttgcgatggatcttgaatatgataatattatttgcgactcattcatagatctagggatgaaacaatccaaaagatctaaagcaatgggatgttcggcactaaaagacttaatagaaaaagataagctgatcattaatcataaaggaactattcaggagttgcgcacattctccgagaagggggtaagctgggcggcagaagaaggttttcacgatgatttggtcatgagtctggtaatatttggttggttaacaactcaagaaaaattcgccgaatatgcaggaaaagacgaaatgcggatcgcctccgaaatattccgaaaggaattagatgaattgggggaagaatacgcgcccgtggtaatatatgacggtgcaaacggcatcgaagaatataggccgcgtgaaggtctaacaatgatataaatacgataatgcataaaaagatgaggaaattctaatgactctattatcaccgggtttcgaaacgaaagaaactactctctccactaccattgtgcaatctgcgactggtcgcgcggcgctggtaggtaaatttcaatggggtccagctttccagattgttcaagtaactaatgaagttgaattagttaataaatttggtcagccggataataacaccgcagactatttcatgagcggggctaacttcctccagtatggcaatgacctgcgtgttgttcgtgtactcaataaagaaaaagcaaaaaacgcaactgccctagctggtaacgtagaatttagtattaccaacgaaggttctaactacaaagtaggcgattcaattaaagtaaaatacaaccgtcaggaagttgaaaccgctggcaaagtaaccaaagtagatacagagggtaaaattaaaggtattttcatcccaaccgggaaaatcattgctctggctaaatccgttggcgtttatcctaatcttgggaatttcactgtagaaatcacttccggtactggtaactcaaatgcggcaattaccatttctaaaattgttactgattctggtcttctcttaacggatctggaaacttcccgcgccaatatcaccaatcaagaatttttgactaagctcaaaaagtatgatatgccagcggtaagtgcaatctatgctggtgagatcggcaactctctggaagttgaaattctggcacgtagcgcgttcagtggcgcggcagcacctgaattaactaggtatccgttcggtggaactcgtgccgcagcacgcaacctaattccatatgcaccgcagaatgataatcaatatgcgtttattgttcgtcgagatggtgttgtggtagaatcctatgtactgtctactctgaaaggggataaagacgtatacggtaattctatctatatggacgacttctttgctcgtggttctagccagtacatctatgcaaccgctcagggttgggtaaacggtttcagtggtatcatctctttggttggtggtgtgtctgctaacgaagcaacttctggtgttggtgctgatccgttcattggtgcgatgatgcaaggttgggatctgtttgctgaacgagaatctattcacgtaaacctgttgattgctggtgcatgtgctggcgaaggtgatgcattctctactgtacagaaacatgctgtttccatcggtgacgagcgtcaggattgcttagtgatggtttctcctccgcgtagcactgttgttaatattccggtcactaccgcaatcgataatctgatcgcatggcgagaaggaaatagcaattattcagacaacaacatgaacattaataccacttacgcggttattgatggtaactacaagtatcagtatgacaaatacaacgatgtaaaccgttgggttccgttggctgctgatattgctggcttatgtgctcgaactgatgtggtatctcaaccgtggatgagtccggcaggttataaccgtggtcagatcatgaacgtggttaaactggcaattgagcctcgcaaggcgcaccgcgatcgtctgtatcaggccgcaattaacccggtaatcggtgctggtggtgaagggtttatcctaatgggtgataaaaccgctacgactgttcctagcccgtttgaccgcattaacgttcgtcgtctgtttaacatgctgaaaaagaatatcggcgattcaagcaaatacaaactgtttgaaaacaacgataactttactcgcgcttccttccgtatggaggtttcgcaatatctcagcacgattcgctctctgggtggcatttatgacttccgagtacaatgcgacaccacgaacaacacgccggatgtaattgatcgtaacgaatttgttgctagtatgttcatcaaaccagcaaaatcgatcaactatatcatgctcaatttcactgctgttgcaactggtgctgattttgacgaaattatcggtccagctaaccaggcataatcagtaaattagcatagattaaaagttaaatcaagcggggattttctccccgctctattaaggaatatcaattatggcactcgatttgaatgatattacacgcggtttcgagtctggcgattttgctcgtcctaacctgtttgaagttgagatcccgtatctggggcaaaactttaagctgatgtgtaaggctgcgactgtcccggctgctaccgtagaaaaaattgctgtaggctatcaaaaccgtaaaattaacatcgctggcgaccgtgtatacgacgactggaccatcactgtattcaacgatgacgcacacaagatccgtgatgctatcgttgcatggagcgatcagacacatggcacaggttcggcgatcactggtgcaactcctgcacaatataagaaacaagctattgttcgtcaacttaaccgtaacaccgaatcaactagcgaaaaaacattgtacggtattttcccgaccaacgttggtgaagtaaccctcgattgggaacaaaacaacgaagttgaaacgtttgaagttacttttgctatcgattgggtagaataaatatattatcatgcggggagaagttccccgcttaatttctcccaattcgaggtgaataatgtttagtagattaaaaatgcttgcgcgttgggctgattttgacaacgacaaatacgaagaacaaattaaagataaagcagagtctatcgccgcacctaaaaacaatgatggtgctacggaagtagaaattaacgataattcacctgctagctcgtggaactctcttacccagcaattttacagcaccgaccagaaaatcagcacaactaagcaattagttaacacatatcgcggtttgatgaataaccatgaagtcgaaaacgctgtacaaaatatagttaacgatgcgattgtatttgaagaaggttatgaagttgtttcattaaatcttgaggcgactggctttagtgaatctgtaaaagagcgcattcatgaagaatttaaagatcttttaaacactatccagtttgataggcgcggtcaggatatgttccgtcgctggtatgtcgattcgcgtattttcttccataaaatcatcggcaaaaatccaaaagatggtatcgtagaattacgccagcttgacccacgaaatcttgaatatgttcgcgagatcattacagaagacacaccggaaggtaaaatttataaagcaacgaaagaatatttcatttacaccgtaggtaatagctcttattgcgcaggtggtcaagtattctctcctaatagtcgcgttaaaatcccgcgtagtgctattacatacgctcacagcggcttgatggattgcgatgataaatatatcattggttatttgcatcgggctgttaagccagcaaaccagcttaaactgttggaagacgcaatggtcgtttatcgtatcacgcgtgcaccggaacgccgagtgttctttattgataccggaaacatgaacaaccgcaaggctgcacagcacatgaactcagtggcacagtcttttaaaaaccgcgttgtttatgatgcatcgactggtaaacttaaaaaccagcaagcaaatctatcaatgacagaggactactggttacagcgtcgagatggtaaagcaatcaccgacgttactactttacccggtgcatccggtatgagtgatatcgatgatattcgctactttaaccgtaaattgtatgaagcgttgcgtgtgccattgtcacgcagcaatctctccgatgctaatatggtgatcggtggtgatggttcagaaattactcgcgatgagttggaattttcgaaattcattagaactctgcaatcacagttttcggaagtattgcgcgatcctctgaaatataatctgattctcaaaaatgtaattacggaagacgattgggatcgtgaaataaataatatcaaggtggttttccatcgggactcttactatacagaagttaaagacgcggaaattttagaacgtcgaatcggtctaatcgaacgtattacaccttacattggtaaatatttctctaaccagacagtgatgcgtgacattctgaaatataccgatgaccagatggacaccgagaagaaacagatcgaagaagaagcgaacgatccgcgctttaaacaaactcccgatgaaatagaggatttttaaatgaaacaatttatcgaagcaattaaaactcgcgatctaacgctgatcgaaaaagaatttgataagatcatggaggctaaaaaagcccagatcatcgaatcccagcgtgtcgaaatcgcatccagtgtcatgatcgaaggtgaagaagaaaaagaccgcgatgatgaagatatggattatgaggacgacgaagacgaagatcgcaaagacgataaaaaagacaaagaagacgacgaataataggaagccaacatgattaaagattttactcctaaagctgacttagaaacttttctgccggaagcacaggaaaaattggacatgttggctatgtttgagtcagaagaactattgaaaatcgttgaaggtatctccgaggatgagcctgaactggcggtagcaatgctgtctatcatcgacggaattactgtaaatgaagcaatggttaaacatgtaaacgcacgcggggaagttgcacgtaagaaagatcgcaaaacccgtgagcgtaatgcttacatgactactggcctaagcaaagctaaacgccgtcaaattgcccgtcgtgctgcaaaaaccaaacgtgcaaatccatctatcgaacgtcatgcggaacgtaagcgcaaaaaagcaatgcgtaaacgtaaggcgttaggattataacaggaaacaacatggaaaagaacgaattactgatcgaacaatggggcgttccttgtgctcgcggtagttcgtcattgcttgaatcatttgatgataaggctacaggaaatctctatattcaagggattttcctgcaagccgaaacagtaaaccgcaataaacgctggtatcctcgcagtgttctagaaaatgcggttactaaatacatacatgaacaagttgagacacatcaagctctaggcgaacttaatcacccagcaagagcaatgccagatccatctaatgcttgcatcataattgaaaaattatggtgggaaggtaataacgtgatgggtaaagcccgtgttattgaaggggataaaggcgcaggtgataaacttgctgcactgattcgcgctggctggattcctggcgtttcatcccgtggattgggtcgtttgaaagactcaggtcgcggatacaatattgtacaggaaggttttgtgttgacggttggtgttgatgttgtatggggtccgagcgcaccggatgcgtgggtaactccggtggttgagtcaacggatagcgattctagcgcgtcagacgcaccagaaagcgataaaaccgaaaaagtgactaaccctacagcctcacaacaaaacatcgtagaatcgaataatagcgcgtttatggcgctcgcagaagcgttatctaaacgctataaataataacgtcgttatcaacaagaaggttataaccatgcttaaagaaatgctgctcgaagaagcaaaacagatcaccgtagacgttgctctcgatgacctgtttgaatccgtcgaactgtcgccggaagtaaaagaaaattttggtactatctacgctcaggcggtaaaagctaatgctgttgctctggcagaaagccacattgaaaaaatcgccgctaaagccgatgaactggtagaatcaaaggtcgaagaagcacgcaccgagattgaaaccaaactgtacgaagatgcagataaattcctgaatcacttaggcgctaaatggctggcagaaaataaagaagccgttacccgtaatattaaagcggatctgtgcgaatccctgattggttctctgaaagatgttttcgttactcacaatgttgtagtaccggaagaatctgtagacgttgttgctgaacttgacgaagcactcaaagaagaaaaagaaaaaacctctgaactctttgatgccaaactgcaacttgaaagcgaaattcgtggcatgaagcgcgaacaagcgatcaatgaaagcactcgtgatctttccgatactcagaaagaaaaagtaaccgcgctgattgaaggactggaatatagcgaaactttcgataagaaattaactgcaattgtcgaaatggttgctaagaaagaagacaaaccagcgaagattgaagaatcactaaatactgatgccgacaagctgaatgttattgcagaagctgttgaagaatcagagaaaaaggcaactgtagattccggcgtatcccgctacctgaatttcatctaatgtaattcaaatctactttataaatactttaggttaacaacaaacaaggtttaaagaacatgaaaactaccaaagaactgatggaaaaatggtccccgctgctggagaacgaaaaactgccggaaatcgcaactgcgtctaagcagaaactggttgctaaaattctggaatctcaggaagcggattttgctgtagacccgatctataaggatgaaaaagttgttgaagcattcggtggctttatcgcagaagcagaagttgctggcgaccacggttatgatgcatctcagatcgcggctggtcagactactggtgcaatcaccaacgtaggtccggctgttatcggtatggttcgccgtgctatccctaacctgatcgcatttgatatttgtggcgttcagccgatgagcactccgaccagccagatctttgcaatccgttctgtatacggtccagatcctctgaaatctggtgctcgtgaagcattccatccgatgtatgcacctgatgcgttccatagctctcttgctgctaaaggtgcatctgtaggttctccgaccgggactccgtttgctaaactaactatcaatactcagattgaagcaggtgatattgtacaccacaccttcgcagaaactggcattgcatatctgcaaaacgttaccactggcgcagtaaccccgaccaaagctggcagcgagtcagatgatgaagttgtcatgaagctgatggaagaaggtaaactggctgaaatcgctttcggtatggcgacttccattgccgaaattcaggaaggctttaacggttccagcaataacccgtgggctgaaatgtcaatgcgtattgacaaacaggttgttgaagcgaaatctcgccaactgaaagcccgttactctatcgaagttgcgcaggatctgcgtgctgtacacggtatggatgctgacgctgaactgaatgctatcctggctaacgaagttctgctggaaatcaaccgtgaaatcgttgacgttatcaactttaccgctcaggttggtaagactggtatgactcagaccgttggttctaaagctggtgtatttgacctgcaagacccgatcgatactcgcggtgctcgttgggctggtgaatccttcaaatctctgatctaccagatcgacaaagaagctgctgaaatcgctcgtcagactggtcgcggtgctggtaactttgttatcgcttcccgtaatgttgtaaacattctggcttctgctgatcagggtatcagtcttgctatgcagggtgctgcaaaaggtctgaataccgacaccactaaagctgttttcgctggtgttctggctggtaagtacaaagtgttcatcgaccagtatgctcgtcaagactacttcaccgtaggttacaaaggcgacaacgaaatggatgctggtatctactatgctccgtatgttgctctgactccgctgcgtgcaactgatccgcagtctttccacccggttctgggcttcaagactcgctacggcatcggtattaacccgtttgcagacagcaaatcccaggcaccgtccgctcgcatcacctccggtatgttgagcaaagacagcgtaggtaaaaacgcatacttccgtcgtgtatgggttaaaggttgctaatataagccattcctgaaaactccggtcgggtgcaatacccgacttatcataaaccttatgacagtgtaaagtgttaattccaaagggaagactcgaaagggtcttccctttttgcgtattataacccgttataaataaggttgcaagcctatattctattgtgagcgaaaatagatacacacaacaaagacaggaagatgcagaacatcggtgggttgctagcctaaatccggtggctatgatatgtgatttcttttgatgctggatttattaaaacacaacaaacaattccaccaattttcgtagtaactgcatggcaaagggaccaatgaatgaaatgagcgttcatgttgatattgggtcggatagatttggtagatatacagatctgatgtatgccgaccttgttatgacattccggtgtgacgctagcggtaatttttggttttggtacgctgttccctgaattaacccaaaattctccataaggaggaatgcatgagtaagaaagaaaacagctatgttatgactcgtaaggaatacaacaaattgatgttagcattagcttatgcaattattcgttctgatcatgcaattaatctggtaaacaaagttaaccgtagcgttgataatgtttctaggaagaagtaagtttattttggaatccttcggattcctttttctttttgtataaatatgatatatccattaagcaaatacaggattcataaacatgactcatatttttactgaactgttgcgggaatctacttcctcagtagctaaccagacagcgcgaccgcaactattatcattaactcgcgcggtaaacaacctgattttctctgatctggtagcaatccagccaacggatcaaccagtatcggcattgtacggcctacgttatcttaatcgtgatggtcagatgactttccgaactgctgcgacctacggtggcgcggctggtgatcgcacagagattgaagagttttcaaaagaaaaatcttatgacgaaggcgcactgttcaaatcaggcgatgttgtatacgaagttgtgaccgctggtacagtcggtgaagatgccgaaactccagaagctgcgatctttaaaggcgtaatgacaaacaaaattcgtttctatagcgattgtgcatcggtagaatactttgaagataaaaacaccgaaattgcgtctacctctatgcagtttgacaagtggcaagttaatgtaggttctcgtaaactgaaaacctcgttcaccactgaattaatgcaggatcttgaggcaagccaaatcaactctgaaaactctgtaattgatcttctggctactgttgcttccgaagagatcaacaaagatattattcagaagttgatcactgtatcatctcgctataaaattaaagggatcacccctgatggcgtactttctctcgttagcgttcaggatgcaccaacacaagcgcgtgaactttaccgctatgcttgcgagatgagcaatcaaatgttgcggacttcctcctttgctggtacatacgttttggcgtcttctcgcgtggttggcctcctgcaatctaccggatggatggaagaaaccgacaatgctctaagcgaaggtcgtctacgttgcggtctggaagtgtacgcagacacgacaacacctttcgattatatgctcgttggttgtaagcacatgatcggtgatatggagagtgtaggttctctgttctactccccatatacagaagccgacggcgctggcgcgtataagagcgtaattgaccctaatagcttccagcatcatgtagctattatgaatcgttattcactctctgtcaacccatacacatcaaaagttgatcaggaagaacaccaggtcatcaagggtgacgattggggtaaaatggctggacgttcagaaatgtcctacattttaggaatcgaactgccaccgcttgagattgacaacgcttaactaaatatctaaccaagacaagtcagatccgcccaagattttttcgacggcggatctattttcttgatgatataagttaaaacatggtatcccatgtctacgggcaacataaacagcaattctagttcctccagaaacgattccattaacttctttcgcccagaatatcacacaatctacaggatcatcaagtgtctcacctaagacttgagcaacatttctagaaaacagattttgcatgtataacggtatagaacgaggattatcataaacgtgttctaattcatccatcgccagatttttttgttctaaggtttgccatgcaatcacatcatgaccgttatgcttgtggtcataaaacttccaatttggaatgaaaatttttctataatctggatcgtaatacttcatgaaagcattgtccataccgtaagcccctccagaatgcgctacaacgcgattttctgacaataccctcccaatggtactagccattatcaaaatgtcgctaggcgcttttctagagccgattaaagcacatctacgaagttgttttactccaaatagatcttgtaactggtcaaacataatatttcctccatagaaagcaatatcatactacaagttaataacaaatacaagtatccgcgtagcggaagcgagcacagcgagcaataaaaacacttccagtaattgattaataaatgttcgaaacaaatttttattattctataagataagtcttcgttttgatcataatttaatcatacatgtaaaaactacacaaaaggatatcgcttcgcgaactcctacggagtataacatttgtgttacaatatgtagtgattaataattaaccaaagatacattttctatgttctaaagatctttcttcgttttgatcataatttaatcaaacagtattaacattgtgcacatgtaaactaaaattatgttaataacagatacaaaaaagccgtcccgaaggacggctaatgttaattatttgttgataacgatctgatttcggcgaatggtaacattactcttagagatgatcagatcatccggcactacgttagttttgtatggctggaagcgaacaagcatctgattgcgtttagacccttccttaatcttgatttccatctggatattgttgcctacgtgagcaaccgcaatttcacctttattctcatagacccacttgctggtaacgtctccagcaaaagccttaataacttgcaatgcttcgtcgtatgcggtagagctatgaactttcagaaggccagccgtagcaagacgggagcaggtgatcgccggagattgccaaacatcaacattaatttgctcaatcagagtaacaccgccttgatcaactgctttgaatgcttcgaacattgcctttttcattgctacgtggtttttacggaatttcataattagtcacctctattgattagttattcagaatattaattacaaatcaggacattgcccgtttgaatgcgtccattataacagtgttatttggcttgtcaacacgtttttgaactttatttttaaattttttgttgatgtggtgtttacgataaacaaccttttcacggttggcgtaagcctcgcgtgcatcttttaccatcaaccatgccttagccgcatcttgtccgctgatcccgccaatcttcttagcaatatcaacaaaattaagaccgtggtcttcgcgtagcatgtaaacccttaacgctgttttcttgtccatcacttcgccccattgacgattaacaggatagtgatcagtaccggaaactggatcatgacagtaccaataaaccggataaacgcattttctgacttccacacatgacatgcgactagctgatagaccattgttgcaaccaaagccagaaaatacatctcgattggtgcttctttgatcaatcgtacaatctcattcatacttcacctcatacattcataaacacaacaacgaataggacagtaacagttattaaagccattttcaaccccatattcataatattttcctcataaggtaacgccctgttgatgtgtgccattataagccactaaatcacactgtcaagcactaaaaacaaaaaagccaccccgaaggatggctgatagatttcattaagcaggatgcgtttcacgaatgcgtagaactcgctctaacgtatctcggtccagtttatgtaactctttggaatgatacatgaaaccattgcgagattccatgcaagtgcaatcactatatttttcttccgctgccgcgattgtctccagatctttggcgtacttgctggtagaataaacttctcggtcacgccactctaacccagcctcattgaatttaacaatctcgtcaaatacccaccatccaatgtagataaatgaagttttgcgccacgggatcgggtgtacgtaacgaaacattttaacaacttccattgaacattttctacttgtacttgttgcaacttctactgtttcatcttcgatctgttgatatagtttagcaacacaccagaatttggctgtgtcatcgtaagtagcactctctttgaacagatgaccgtctggcatgatagaaaatccttccagtgcttcgccgacctcactaccgattagagtcggtgacatttgcccttcgcgctgcaaataccagttatatttgatcgtcaaattaggcataccgctagaatcgcctacaatgtcctctgacacaacataattaagtaagatctcattacctagtgccacggtctttgattccaccacatcctgttctacgttcattgttgccagcatgattttagtcgatgcgctagcggctgaatcttccgactcaccccacacttttacagtatacacgccgtttttatctgctgtaaattcttggattgtaatgtcctgttttgtgtctataacttcttcgcccttactccaactataatgtagttcatagtcgtctgctggagtcttcccacccgaaaattttactgttgcatgtaattctacgtctttttgtgatgatacgtagaaatgctgcggttcggtgatatttacgattaattcagcttcttccatgaggaaaacgtcagattctactgattccatcgtatcggtatcttgtaccgttactttatagctacccgcattttcacttgttgcacctactacagatagcgtagctgtgctattttcatgtggttggtcgtcttttgtccatgtatatgtcaaattgctgggtaatggttcgtcacccgctacagtcgccgttaaggtgaaaccatctccagcaagaaagcatcttttgtcagatttaattgatactgtgaaagccatataaagccactcccatagaaaatccgaatttaattaattgaaatagttgattgccatcaaccagataaccattgcgagattccaatacatgagtattagaatagtgatgcaacgaggccgaaatagtatcgatcacgtctgggtatttgttctgtttgatgtaatacattgattttgttagacatgtagtatcctcttttaattgcataacggaactacaattaaaattataacaaatatttcacaacttttatcacccaaaaattacttgagtgtgtggaattggctatgtttagtctctcgcaccttgacagacccatcgcgtttgatataatagatcagtgacttgagggtgtcgtgtacatacgcgtgcgggaaacgctctggatacttcttccaatctggagtattaacgatccagtcgaaaatccaccacgggcaggagtagtaaccacgaccgccaccgatcaagcaaatggtcggacggaagccagtaagatcgcaaaatgaatcagtgtcatttgctggggaacgatgttctgcttcgtcagagaaaatgtttgctaccggagattccactttaacttcctgtgcttcttcaacatctgacttaacttcttcgaccactggttcaactgctggagattcttcttttgtttcttcaatgacgatctcaggttctttcattgcttcaaccagagacgggtcaacttcgtcgaataccactttatcatctgcggtgtctgctgccagaataagatcgttaataccggttccttctgccggagtttcttcttccatttcggaagcaagtttagttaattcggtttctacgaactcgatcatgttctctagtgataaagtctttttgaccttgatatcaaattgtttggcataatcagctaattctgttttagcggttttctgtgcttctttgtcgtcggacgccgcaatagcgcggagttcttcgaaatattctttatcaaacatgttattctcctgattgggggtgtttgtataaatatttgtatactgtatttattgagtgaggctattcgctatgcaagatattaaaattcactttctgaactactcccatgttcaaattgaatgtagcgattcaattttattagaaatgcgagattattttagttttgaagtcgagggagcgcggtttcaaaaaagatttaagtatggtggatgggatgggcgtattcgtcttttagattacaacggaaagctgccaatcggcctaactaaaactgtgggaatcttcgctaaaaatatgggctatagcgtatgggtagatcctcgcttattcgaaaaagaacaagttacagaagaagaaattacaaaatggtgtaataacttagaattatattccggtgctaacaggatcaccccgcattggtatcaatcaaaggccgtctttgaaggtattcatcataaacgccgcatgttagttttgcctacgtccgctggtaaatctgcgattgcttgtatgttgtctcgttggtacttagagaactacgaagggaaagtgttgatcatcgttcctaccacgtcgctagtgctgcaaatgcgtgatgactttgttgattatcgccagtttccttatgaagcaattcatactatcatgagcggtactagtaaacacgtaggtgatcgcctgatcgttgttagtacgtggcaatcagcatgtaaacagcctcgtgagtggttccaacaatttgggatggtaattgttgatgaatgtcacaaagccactgctaaaaacctgctaaacatcgttactgatatggatcattgccaatttaagatcggcatgactggttcccctcgtgacgggaaagctaacatgatgcagtatgtcgggcttttcggtgatatttctaagatcgtgagtattgaccgcctgatggaagaagggcaggtgacaaaactgaaaattaactgtcttttccttcgttataccgatgaggaatgtagcgcggttaagggtagagaatatgcggaagagatcaagtatattacgtctaacccacgacgtaataagtttgcttgtaatttggcgctaaaactcgctaagaagggcgaaaacgtattcctgatgttccgcaacactaagcacggaaaacttatgtatgatgcgttacagaaggtacacgacaaggtttattatattgacggtggagttaagacagaagaacgtgatgaatttaagaaaatggcggagggtgacaccgggatcatttgtgttgcgtcttatggtgtgttctctactggtgtttcaattaagaatttgcaccatgttattttcggtcatccagtgaaggaatcaactatcgttcgtcagagtatcggtcgtgcattgcgtaaacatggttctaaggatattgcaacggtctgggatcttatagatcatctggcggtgaagacaaagagcaagaatgctaagaaacagtttagtcaccttaattatgctcttaaacatgcccttgaaagaataaaaatttacaacaccgaccgattcgaatatgtcacgaaaaccatcgagatttaataaataggggctttaatgcccctttattctacggagattaaaaatgattagctttaaacgttttttggttgaggccgctattgacggtttcatgcgtaagatttattcttgtaatactatcgagggattaaatgaacttgaggcatattatgagaagcgcaagaaagaaacagaattgaaacctgctgatgatatttcgatccgtgatgccatcgctggacgccgtaagcaattggaagcggacaacgagccagaagatgagccggaagaggatttttaagatataaaaaagccccatcaatgatggggcaaaataaaccaattaaaatcggttatcaacaaattacattaacagcattgtttgctctacgagttgttcttgttcttcgccgttcgcatcttcactaatcgaacgttctgttactagctgtaagcagtagccagtgtgaacaacgccgttttctgtctggacggctaacgcatcctcgacaggttgtttacaacaaatacagattttcataaaattcctcctgcatgtatttagcgaccagattcaagcatacgcaattctatagcattcttgatcgcaaatccacgagatttaacgatatcaagtgcgcgaccagcgaaatccattaccatctggtagtatgcaattttcgtatcaagtggtaagatctcgtcgtctgctgccatgacaactttcaattctgatttctcatactcagcgcgacaccagtcatcactacggttagtgtaaaagtcaagacgatttttcatagcctttttctttttagcctcaagagcaatcgtctctcttttcgcctcgctgtaaatccttaaccactttgagtatactaccggattattcagcgcctcccattgcaacttagtcgcatcgatcttcatgtcagcttctaattgttctttcaaatcgtttaggtccataatatccccttattcacactaagacctatatcatatcacacacaaaatcactttgcaagtcttatgcgtagttgttcaagatcatctgggttatctattactgaaaagtagattgatactatgattgagttatcgtcgtactgcggagttacttctactgtcaggtttcggacccgtggttcatagtttcggatcgcctcattgatgttttttgataaagtgtctactgtcagtgggttcatgttctcaaacagtgatttattgagatcgcatccaaacagtggatcaaatggacgagatcccttgcgagtagtcacgatcagtagaatagaatccttaaccgctttaatccctatgttctttttaacgtcgttattccacgatctggatatattgagatccaaatcagtatacatctgattaatagttgccatgttatacctcaaagaattttaaggaaactggatagacctgataatgaatatacaccagattccccgcattcgcacttgatcggtactgccagcgtgatttgatttcttgttagctcgtcgatcacttcttccactttatccgtggtaagcatatccagcacgcggtcaaagtcctgtgcgttcaggtcgtctatattgaattgctgatcgccgatcacgatatattcgatacatgcaattaccatctgcataatatcaacatcttctgtaaatttaggttgacgaaacttgatttttacttgtcctaagtccagaatatacggttcaacttctggtatctgtgtgcgtgaaacatcaagagagtatactttctctttattgcatacaccacacacccaagtagcatcaattttcatcttattgaggctgtgacaccataagagaagaaaaatatattctgcttcgcatttctctagctctaatgcattgatccccgtacattcatgtatgatctctataacaacctctgacagcttgccagtctcttttgctgctaccagtttttgaaattcgccgaaggtgaaagcacgggcgtgtatcaacttttcgcctaattggatcttgaaaaagtattgcataataaaacaccctttataaacacatagaattatttagtattttataaatacccgaaagggggattataccatgaatattatccgaataaaactaccggaaggtgtgcagagatttaaaccattcacggtaaaagattatagagatttccttctggtgtcaactgaaattaagatgaatccagaagaagaacaaacgattctggatgagctattagaagaaatatatccagaagtagatccggcatttcgtgaatatattttcctgaatgtctttactagttcaatcggtaaaactaagataccgctttgttttacttgcccgacttgcaacaaagaaagaaaaatgttgcttaacttacaggttgaagcactaaaaccaatcgttctagaggccgcagggcttaaaataactttccggtatgttaaaccatcaaccgactatgcaaaaacgtttctggatgcgatagagcgtgtatctgatggtattaatgattatctatggactgaattaccggaagaagttagagaacaggttatcgattcaatctcatttgctgaatttgaagaagttgttaagcagatgcacacaatcaagatcgaacaaaagatatcttgttgtgaaagtcatgacctgaaatacataggtcttcttccattattcaaattgttgttgaatccagatgagttattcatcttttatcgaataaaccatctattggcaaaatcaaattattctatcagtgatcttatggatatgttaccgattgagagaaacattgcactgacactggtcgagaaagacgtaaaagaggcaactaatgcaaagaacggggtttcctaatgtctcaataaaactttatcaggattatgaggcatttctaaatcatcgctttatagagttgggtgctacctttgttacaatgactctgcgtgattcgattcgtggggtgaatgaaggattgttgcaattctatgataataaggcgatgcatacaaaattaaatgggagagagatcattcagatttcgctatccactgctaatacagatgaagtgtttaaccgaatctatgggatctctcatagtaatgtaacaattgaccaaaaatccgacaacattttaacattccagttaaagagctatcacgaaacactaaaccttaaattttctcgctcattaacaaataacgctgttaataacgtaactagcatgattgatgccatctataaggaagttcctttatggaaacctactataaagggtgataacgttgttattcctcgttgtccgtgggttagtaccgtaaatgactatatggattttgtgagggcatacgggcaaagcgtagaaacagagtctttcgtgtattgctgggaagattttgatggtataacgatcgctggacacgatacattattaaaaaatgagccaataccagctataatctgtgagcctagactcatgggtcaatttattgatatgtcacctaatctgatggtttttaatttcgagtggcagactaagagcaatgctaaagtcaaaaactcgtttaacaatgtgacatacacagctattgattttgttactaagcagtataataaaattgttgttggtaatggggataatattgcacactttgctcatggtggcgcttatggagatttaacttataagaatgcgtttttggaaggttctaaacttgccacaatagaacaatatgattcgtatgctaccgccgtgtgtcacggtaatttttcgttgcgccccggtatggttattcgattctttgatgagaaacaacaagcacgcaatgattttattgttgacgaagttgtgcatgaaattagccgagagcaatcattaactcacctgtatatgatcggtaacagcgaagaattacaggaagtcaaatttgaaggtaagatataatgacagaaactaaacctatgttaaaatttgttgttcctgtaaaaaaattagagataaacgggaaacatattaagatcccaaaaatggggattaagcaacatcgattattaaaagatgttcgtagctgtgatgaaacattaaagattcttcttgattcaatctgtcctgggttaaacgctgccgagtctgaattggttatgcttaacctttgtgcgtttaatggtaagtgtctggaagaaaaagatggtcttaagctgtctgatgtgtatatttgtacagagaccgaatttactttaaatggtaaagtctttaaatttaaaaatccaatgtatacttctgaccccattatcgatgacgctgatttcttgagtcatcattatcacgatcctagtgtagacttccatgatttcccagcttttattatggattgggctacaggattaagaaaaactattgcgctggatacgccggaaggcactatctatggtggaattaacatattggatcgcctatcatgaatgacgcattaacatcatttcgcgggatgcgcaaggaagcggaagaaaatccgattgataaacttaacaagttagataaacttgattctattgataatttgcaagccgctaccgaattggtggcggagacagtagaacaaaaatctaatgaagttgttggtgcggtagaggataacaccgcagccaatgaattgacggcagagaatacccaatctaccgctggcaatacccaaaaaacttatgaagaattgcaaaaactcaataatttctcttctcagatgaatgagaaattacgtggttttggtgttatgatggaacgtagatttggtgttgtcagtaaaatggctagcggtattggtgcgattgaagaagcactgaaaaaacctgaacaaccgcaaacaatgccatcacctcagccagttttgcctactgtaccggaacagcctaataatgacaactatcaaggtcttccaaagaaaaaaccagatgttgaggaacggaagaaaaagaacgccgcagataagcgcaatgcggattctatggaaaatcttcttaaagttgttcgtggaggatttaaagaaaccataggtatctctaataaggtcttagggatgttatttaagatcaccttgaccgctatggcagaagccgcaaaatggggcgctattttgatgggtattgtttttgccatcgacacccttatgattcatttcagatattggagtgatttattcgaaacaaaattcgatgaatttatggataaggccggagaatgggctggaccaattagtgatattctaacaactattcgtcaagttcgagattattggtctaaaggtgaatatggagaattaattaaatctcttgttatgggtattggtgatgcattctataaaacctttatccaacttgatcgaattatcactactggtattgctaaaattcttcgcatgatccctggtatgggtgattatgccgataagttagaatatggtgctttaaaatctgctgtcgctcaaggctatacgccaaatgaaagagaactcgaattaatggataaggtcgagtctgaacacgaagaggacaaatacggggagcgtactggctggaccggaaaagcccgtgatattggtgaggctatcggtgactccattaaagataaagttaacgagggtcttgttagtctgggctggagagatcaaaaggatgttgacgcagagaagcgacaagaagaattaaaacgcggggaatatgagtctgtttctgctgaacagcgatctgctagtcgtaaacttagaattaaaagcgagggcgcgatcaataatattaatgaagttatggagaacttgagcggtgactatgacaaagaaaaaattggagagttgaaaaaggatattgatgtttaccgtgagcaagttcaagatcctacattagttgaaagtgatcgttctcagttagagcgtcttattgaaaaatttgatgagatgtatgctgataaaactaagggtgtggttccagctaaatctgttccggcaactgaaacggaaacagcaaaacaagcggaacgtactgaacaaatgcagaaacaagctgcaatccagcaacaaacgacaaatcagacctcaaacgtaaataatacacaaattgtaacaaacaatagaactattaaacagggtgcaccaacaactagaattgatgcaccaggtacaattaatatggggaacttttaatgaaaattagtgttatcaatgatgccgttgatagctttaaagcgggggttaaaacctccgctggttttacctcaaaaaataaagggaaaacattaaccgctcaattccccgctgaacgtgctagcggtaatgatgctagcggttattatatcaacgacttatataataatggtctgttattcactgcatacgattacacatctcgtactactggatcgttgcgtgatttcaggaaaaagaaaaatgttgctagcggttttggtggtagcgttaatatcgctggttttgatttaaatttgggtgggagaaatgctgcatttgaccgagaggcaattgctaatattcttcttcctcgtagtcaatctgacgttgacgctgccagccataagtttaatgatgttggtgaatctgttatttctcgcggcggtggtactttaggcggtgctctttctaatatggcatctacggccgtttttggtggtatcgaaagtattactggtggataccttgccgatcacggtgaacagatttataatactgcgcgaagcatgtatgcgggtgctgacgcacgaacgaaaaactacgtatggcatctaaccccacgtagtattgaagaccttcgcaatattctgatcatatacgaaacgtttttagagttgtcttatggttctagtggtatttccagcaccgcaaaagaattaaaagcggaagttgatgcgtggtataaaaatacactattgagcaaatccactccagccgaggcaaagagaaatgatacgctgtttgaagggatcaccgattttctatcaaacgtaattactgtatctaacccgacaatatggatgatatctaacttcggtaagcgtacatcgtttgaagggcgtagcgatgcatttggtcccgctcagatctcaagtgtacgtctggacaagtcgcctgatggtaagtttaatggccttgctatttctcctaacttgccgagtacctttgttctggaagtatcatttagagagatcttgacactttcccgtggtactatatttgggagtgcggcataatgtttgatttaaatgactttaacgaacaagccgctaaccttgactttcagcgatcgaacttattcagtgtggcatttgccaccactccaagtaataagacacaagcgatcctagaaagtatgggcggtgcggtatatgatattataccaaatgcattaaatgactatttcgggattactcgtggtgattatactgacgcattaacaaatcttgctgtacagggtgttaggcgtgctgttgattcatccggtgtcaaaaagtatcttttaggtgcaatgtcatcccgcgtagttcaatctcttctggggcaatttgatgttggtacatatgcgcttgactggttcaatatggcatataagacaagcggtcttctggtgtatgctgttaaggttccagaaaacagattgaattatgaaatggaccgtaaccacaatgcgccgaacattcgaattaccggacgtgattttgatccgcttgtattgagctttagaatggactctagcgcatcaaactatagagcaatgcaggattgggttaactcagtagaagaccccgttacagggcttcgtgcgcttcctgttgacgttgaagcagatattcaggtcaacttacataaccgaatgggagttcctcacacgatcatgatgtttaatggttgtgttcctgttggtgtgagtgcaccggaattaaactatgaaaacaacaacgaaatcacaacattcgatgttactttcgcatatcgttctatgcaaactggtgctgtaggagagcaagccgcgcgagaatggattgaggataaggcaataaacgcaataacaaacactttcggcaataatttacttgatagtgggttatctgctgctggtaatgctttatcgcgtctaaatggcgttggtgggcgtgtggtgaatactgtcactaactggttctgataagcgaaaggcggggattatcccccgcctttttattttgctaaatcattgcaatattttagtgccttagtttgaaattctgcgctgttaagttcttcataacggtcataatcaccgtttaatgctgcctttcttgcttcttgctctatctgcatgtcagacatgataatacagcgatcccgtgctttcatcttctcaagttgtatagactcttctttctgtttgcgcaattcttcttgacgcttcttttcttctcgtgctttctcttcccgcgcttctttgattgcatccttgaacatctgcgtttgtggtgctaaaccaactttaacgcgatccacgtctcgacgttccattttagaaataaagcatgattcgatctgaccatcacttgcatatgctgctttacattcacgaagcaagaaaaccggatctgatttagccttcatcatagcttccatgttagcacaaccattaagcatagccactaaagccgcaagaccaattagtttaatcattttcatttagtcacctcaccgaaaattgtaaattgtctacgattctcatcgccgaaagattctactacgtcgtttaccttgacgcaagtcccgcgcggtaaaattacttcacattcgcaaggattccatgcaatcgacccaacaacaaaacctttatgatcttttacgtcaattacccatgatacattacaagaatgttgcatctttccggtcatcgattcatatcgattctcacaataaaggctagtgctatttgaaagccagcctccaaagatgattggtgtcatgctggttgatacaaagtttttaaaggtaaattccttatcttcaataatacgctctattgtttgaatgtcaagatgttgaccacgataaagagtaccgtttaacttttcggttttatccatgacgcaatccatcaaatcaacaatttcggatatctcgtcggtcatgtcttcttcccctaagagagcaccatttacccattcgtattgttcagacacataatcacagattgcattatattctgctggggttatgttgttatgtttgtaatgtttgaatacattatctccaaaatcttcggagtgtacttcatacatcacattaatgattttcttgataaatccataatcttgtgtctcacgctcaaggaagcggataaccttcacataatcatcaaagttaatctgatcactgatcatctcagtgatcatgtaaccattaatcccctcaatgtcatatgtttcgatgtaattatccatacgttccatcattgattcgcgtgattcttctgaaagacgaaaatcctgtaatttcttgaacattttaaacctcccatataacagaaaacggggctagtataaaactagtccccgtttgagtcaaccattatttcttaaaattacattttaaatttatctggcattgcgtctacagataccagatcagcgataagctgacgtagagttgccttatctgctttcttacgttcggttttagcttcggtaataaagctggagaaagacaggtcagaagcaggtttaataacaccttcacggatgaatgcatcaccgtcagcgatcatctcgccagattcttgtaatgctgccagttcatttttgttcataatatgtgcctcaatgtaataagtttcttgtgaatccgtcgatgccgtagcacgagttaccgtatcaaaggatagcacaacaccgcgaggaagtaaaatctcgcattctttgtaagcaaatgctttgttacctactggcaatacagggatgttttccgcgccagcaatggagaaagcaacattagcgccaccttcaccgcgagagccagccatagaatcaacaccagcaacggcactagccacgtttgcattccagccgccaaaaatgttaggtgcaagggaagtgctcacatagtttttaaagtaaaacgctttttgcttacgtgcagtttcccacatttgcgaacggaagtccataccacgatacagaatagtacccggatcaagtttaacgccatagttagagaaggcattatccagtgcatcgcacatcttgaccaattcttctggatctgcgatgccgtcaaactcttccagcttacggtcggttaggaagttgttcatattgatgtatgctgcatcggcatattcgctcaacacaaaaccttccgcgcccggcagatcaagatcaatatctgccatcatttcacccatgttgctagcaattgcttcaaacataccggaagcaacattacgtagggcatcggttttaatctgtgtgatgtgactacgcaacatttcagcttttacatctgctggcatagactggtctactcgatccattgctatggcagtgatcttgttttcgaatacgtcctcgctcatgatttcttttaagcgtttgattgatgctgcgataacttccgcagacaacggatcatattgatcctgaacttttaccagttcgcttactgcgtattttgcatcggcttcgctttcaaaaatagtacgcatgaaaccatagcgagtgataatatcacttgtccagtcattcagagaacgagcggttgaacgttctaaggcttgacgatcaatcagagtattaaactgtttcttaggttctgcttcggtgatatcttcttccggtttaagattaattttttctggatgattcacatagtcgctgttataggtcgcttgagttttcagcatttcttctttagtcaaacgagatttagccgctacgcgttgttctgcttccgcgtttcgttcttcttctgacacaagactagccgcatatgcctcatctttagtcagagattcaccagtagccttagatacccagcgatcacctaaatcactttctactttagtgaacaaggattcatcaagtttaatccctttaatcttatcaatcgccatcccgcgacgcttgacaacaactaaagcgatctttttgctggtcattacttcctgctggaatacttcaaacttcggtgtacgacgcaccaaacgctctataacgcgcttaaccagttcggtcttacccttcatacgggatacgttaaaacggaacataacagcgtctaattgcgctttacgggctgtttccataaccacatcaaaagcacttgccataactgcaatcgggttatcgcctagaccatttttaagctgtacaatacgaccgcttttgttcatttcgcacagtacaacatgtgcggtcttgtcacccatacgaatgattttaggtgttttgttggtgaagttacaaagacggacaatcacatctttatcgcgtgtctgtactgcaaaaagctgtttaggattctgcttaggctttaagcactgtaccggagcaatactgccaaagttttcttcctcttccgtcaacagccatttctcgaaagattcaatcattagatcgtcgatttctaagttaaacattttatatcctctagttgataacctataaacctatatttatgaaaaaggggcttaacgccccatttattataatgcaccatcgagcaattgctctaaggtgtatcctgaatagtctttttcaatcaggatatattttcctactcgtttaatacaaccacgcatttcaacgtattctgcgtagttgatggtacgagttgttccatcttccagtaatgcagtaccgatttcgttaatgcggtcataagttacgtcggtaatgatgatttcgatgttagccatttgatactccttagtagttcgtttcggtatgggtgtattatgatatacaccctctgttatgtcaacaacttttagaacatttttgaaattaattctgctttgatttcgcagagaacatctaaagatttctcgtcacctgcttttgcggcttctgcttgcatttttgaaatggcttcaatgtcagtgcaattataagccgcttgaactttagcgattgcgatgattgccgattcgatggttaagtgtttcatgtttgattctcctttcgtttcggtatgtgtgtattataggggatcgatgatcccctgtcaacaactttttagttattttttaattgctcatcttgcaatagggcaatcacatgctggcgatgctcttccgattgaggcacaccgaaaaagtttgttttgtagaaatactctaatcggtcttctcgtgtgctctcttccatcatgatcgctggtagtccgagatttcggaaacgtcgcttttctgctggagtaaaatcactgtaatacaacatagaatcatcattaccagcaatgctaaactcatccttcataaaggagaatattgcgtttaaacgctgtttaccgtccacgatttcgatctcatagcgagagccatcatcaatcttagccattgcgatagcaccaaccggaaaatcattaataaggttttcgataaacatacgtttgttttctgtgtcccatactaaaggacgctgataatctgggttcatgttgatatagccatcttctaaccatgcatcataaacagagatgacaaagtttttagtattggtatagtaacggcgtttaggcgttaaacggttcatgttatagtctcctgaatggatcatcacgtaaatcaatatcttttaagaactcctcccatgaatggcggatattgttcttaattctccagataagagcagggattgaacgctctcccatctggaagtatggatcatatgatccatatgcccaatatgctactacaattccacaatcagcgcaataatattctatttcacttgctggcgaccaaagtccatcaatatgatcggtgatcttgctttcgatgttatggctatgacaatcagggcaacggatgcaatgaccttgtttatcgtaatttgacgttagagaatacttaaacaatctcatcatagatccttatttgcttcaaatactgcctttgcgaatcctcgcggggtaagtgaccttatagtctttgttttcgttcctttcccgcctagcttagaatgctgtttactgtaccctttattaatctgcaaaggtttcttttctggcattataaagccttgtccggtccataagcaagtctttttcgggtacatatcacgggcggcaatatactcaggaaacgtaggatgcttatcatcttccggcaaataaccgccatattcccacggatggaacatataatcaggcttacgccacatgctagagataacgcttacaggattctctatcatgtagggaactcctagccattcacccaaatacgcggttattttggctgcccttacatcatgaacttgaatcaatggtccttgttctcgtttctttcgttcaaagtgcgcagcgccactaacagctaaattggtgcacggtgggaatgcaaagataatatccggtttcccccattcaaggtccattgctctttccagccagttcaaatcaatccaggtgtttacataggtaatgtttggatgttcaaatcgggtattatactttttgtatgtgccgtggtcggcgtcatccgcattaaagcagactaccttatgacctgctttagcccattctagccccattatccccgatccgtcaaagttgcagaatattaatttttgtttcatatacgcccctttaatccaacacagattttagaaggttctttgccgtgccacattaagtaaagtccgttaatgcggccttgttttgtatatgattcttttctgatcttcttatagtgtcgtgcttcctcaaccgattgtttagaataccaatcataaaggaagaggcacaaaggccaaccattagcggccttaatgcagttattaagaaattccttattgcgtttaattaattttcttttcacgctgcccccattggtttgatagtaacagaatctaaaagacctttgttagccagttcgcggcaagttttcagatccgcaacttcccagccagccgcaatcaggttatcaatgaggctgttagcaacttcttcgctcatgaaagagcactgtttgccgatggtgtagcgtacacgctgtaatttcagtttacggaagcctttaacgttcaggtctttagcgattttctttgcggtttcgatgttagccattgtttgattctcctaagtggtatctcgtcttgatggttgtattgtaggggagttatcctcccctgtcaacactttttataaaatcatttgttaatttctggtgcgttgctaggatagtaaccttctttaactccgaggtatttcgcaaccatccctacaatcttctgtgctactacaatgtcaaatttcagataatcttcgccgtgggtttcaatgatatatgcttcacatgctgctttcgtctcgaacattttgattctcctatatctcgttggtatgtgtgtagtataggggatcaccgatccccgtcaacaacttttttaaaattattcgtgattagtttcgatgttgtgcattttgcaccagttcagccaatcgcccagatcctgatagttgatgcttttatctgctgccatcgtttttgtcttgatacccatatgtgcgttatgagtaagcatttttacagtgaactcgattttatcgcctttagctttaacatcaaccagtttggtccactggctaccagcgccgcgaatgttcataccaacgatgtttccgatgtatgcttctttgtttttcaggatttcggttgctttgatgaatttcattgtttgattctccagttcgtttcggtatgggtgtattatgctatgttcttactttggtgtcaacaactttttttagatattttcagaaataaattttaaaacttgacgtaaatgtttctcatctttgatagtcgccggaagttcttcttttacttcctgtgcaagatagatatttccgttccaagtgaaagatccgtcttcgtttacgcgatagctgaacatccactcgcaatcattttcgatttcatatacacacagaagggtgtaatcgttaaagctattgatttcaaggtcgaagccgtggcgttttgcaaagttggtagtggttttagtcagtgccattgtttgattctcctaagtggtatctcgtttcgatgtgtgtattatgctataggcgtgatctggtgtcaacaacttttttaattttttggaaataaaaaaagccgacactaaggtcggctaataaaatcatttagacaaataatcattctgtgcaatccggtcagcatgttccggcgttacgtcaattgcaatcactttaacgcgcgctttcttgactgaattttctcgtagccagtgcgtgtgagcgtgcacatttttatattttgatgctgatgcggtttcaaaggtacggatcggaccagggtaatcagcgtaaaggatctctaggtcatcggtgatgtaaaaatatacatcataattactgttctctagtttaagcagagactttcggaacattgggagattttcgcgggtaaattcaaagatattatctttcatagtattatcctcaatagttggatgaaaaggggcgttaacgcccccatatattaaaacagtccttcctgtacaccgtagtagagttcatcgctgataatttcattaatgcgacggtgtgcatattcctgatttgcgaagttatcagcaagttctactttagtttcgccgtcatgagtccatttagtgataactttaccatctgcaaatttgaagttgaactctttagctaccgcatcgcgtaccagacgtgcaaacttattgttgcggattgcattgtcggtttcgtgtgcagcgtgagcgaatttgttaactttcagggtgatagtaatgtatgccataatttgattctcctagttagaaagtgtatctcgtttcgatgggtgtattatgctatacacccgatcttatgtcaacactttttataaaataattttttgatatttttctatgatgttcgtgtaagtcacatcaaccgctagcaccgttgcttcgaatccaccgtttagccaatggctatgatcatgatcgtgaaagaaacctagaccagtacgaagaccttctttatattctgcgcgtacattcagtttgtcgtcgataaacagataaaaccatgaatttttactaggattgatgatacaacctttcagattagggagaatatcacgactaagaataaacttatcacctactttgaacataatattttcctcacttataaagtttgaccgttgtttttcgcataatgcttaatgcgtgcttgatctgcttccgctggtgatagattccatgcaaccactacaacttctgacgcatcatgatcattatcacttacccaatgattatgattcatacaattgtttgctatcgcgtgagtaaatgatctcattaccggagacgtataatcatagtaacggattttcagattttcatcaacgtacaagtagatcgtatacggcttatattcagtaaccagtaacagacagttacgcaattctgggaaaatctttttagttaatttcattttataatcctcggtcgcggctatagtacactgtacgccatacaatttcatgtttcgtgtcgctccagcacacgatctcatttactcttaaatctttgttatcaacaaaagatgaacattgtgacgcttctttcatcattttatctgctgttttctcatcaaatacagcacagatttctttatacactcgataatctttaaacttgctcataattaacaccaatcaagagtttttgaaaacacatctatccattgttgagtatatgcggtttctttccatgacacaataccagtcgaataatggtttttgtttccagaaaaggacgggcattttgatgcatcttccatcatcttttcggcgaactctggtgcgtatactcgcaggatctgttgatatgctttatagtctttaaatttgctcataatcgttaactaccttatcagcttcttttattgtttttacatcaactgcgataatccgtaaaggttcgtcgaaggtccaccagtggtcatgaatatcagcttgtgatttatcaccaaaggaatcacgaatatcatttttacatttatagctaatgtgaccttcatagtcaacataaaggtaattatcgaaaatcggcgtttttaagatcataccgaaaaatctttctttgtgtgtcttatccagtgttgcagtaattcgcatcataatatattcctcttagaaagggatggtcatttcttgagcttgtacattctcgttaggattaaacttcatccaaccgatattgtctaccagcatatgcacatttttatcatatcctacgtgagtagtcaacactaaatgtgctttaccttcaacgatgatttccatgtacttctgaacttcgatagctttcatttttgattctccgtttgttgtcttgatgggagtatattactactccctttaatcattgtcaactattatttgttaatttccggtgcgttgctcggatagtaaccttctttaacacccagatatttcgcaaccattccggtgatcttctgtgctactacgatatcgaatttcaggtagtcttcaccgtggtttgctacaatgtatgcttcgcattctgctttagtctggaacatttttgattctcctatatctcgttggtatgtgtgtagtataggggatcaccgatcccctgtcaacaacttttttattcttcgtctttatctttatatgcgtatttcataaatttgtctgctacttcatcggcatgttccgattctacgtcggattcgagaacaatagcaagatcggtttcgtcgtttccgtcataccaatgattatgggtatcgttttcttcgatatagaatgagtcatttggagttggacgacaatatacatctaaattctcatcgatgtaaaagatccaatcttcgtaaagaataaccgtattagccagatttttattgccttcaacgaaaggttcagctacaaatagcttagtttgttccataatattttcctcaaaattatacagcttcgtaaacttcccaatgttcagcgccagcacgcttaacgaaaaggttttctttgatgttattcataaacgtctggatggatttaatgcggttggaaggtttccagtcttcgttggaattgcgtcgatacatcataacattaccagatcgcttatattcagcaaccattttaagaccacacataatattatcctcaatttgtgggagagtattaccctcccgattattgttatactacattacgcaaaatggcgtgtcaatgcttcttttgctgttccgctaagattctcgatctctcctggcataacatcaaccgccagaacttctacaacatcctctgatcctaaccagtgagtatgacctttgtagaacttgatatcccatttatcgctatcgctagcccaccacacatcaccgtcgataaagttgatgtaaagcacactacgacacattgaattaattactttcaatactgcgcctttcatatcttccacggtatggtcttccattttgaagacctcacctacctgaacttttgccatttagtcacctctctttattacataacaatcacgccagccgttgaaagttgatgtttcaactgagcattttctgctactgtcaaatcaatgatttcttgtgacgctgcaatcatatagccattggtgatattgtttttcatcagttcaatggtttcttcgttgtagcggattttagcgatgatttcgttgaagttcatgtttgattctcctagttcgtttcggtatgtgtgtagtataggggatcggtgatcccctgtcaacaacttttttgaattatttttcttgatgctcgcgctcgtacttttcgaaataaaattctactggctggtcgtggattgacagtaagccaaagcgtttagccgctcgcaatcccatattgcgctgaatgtacttctggaagttctcgcgtatacacttacgccagtattctaagcccatacagcttttataaagattgcattgcacacatgccggattcatgttatcaagtatatcatgctccggtttatgcattcctacaaccttatacttccacgatccatcatcattacgggcaattcgtccattttcatcatagactacctttgagcgtcgcaatactggtttgatgtggtctgcgtgccagcgatcccctagttcctcgccacaataggcacaacgtccaccatatttcattttcaggatctggcgttgctctttctttgacaattttttaggtttaggggctttcgccccttcattatcacacatcgaatacctcttttactgtatttgcagtggtcttgtcgtagcgaatacgtttgatgatcgggagaaataaagagaactctggttcatcttctttacgtgatttgctgcggatatacccgttgcatgtcatctcaatgacttttccaatcaggttatgacggtcagcccataacatttctcggtcaagttcatttctacgatcgaacggaatcacacgttcaataccatcatctttttcggttgtagtgtcggtcaatcccgatccggtgttggtcatcattcgtccgcacgcactacggacagtaaaaccgcctaccttattaggatctttactatgcggatatacatcaacaatttccgcgtcgaagtcaatcacttctttaaatttaacctgatctttactacggcgatcttcaaatacaccatgtaaatttttaaggataataccttctaagcccatgtttacatagcgatgatatacttcgcgagcttcatctatattgttaactacagtgttttcgattatctgaacacgaggatcgttaagttcttcaacaatctgttttagttcttcgaatcgatctttatattgcttcgttgctttctcgtttccgtaatacacatcacggtcgataacatcccagacagtgtaaacaatacattgggcttcttcttttggaatagttcctttcagtgatttgttgaggataccatttccggtctgacgatctgcaacaacggattcttttactgcttccgctactggcgttaatggcatttcctcttcttcaaatatccatgacagagtaccatcataaacgctttcaacgaagttctgcgctggtgtttgcgaaagggtaggcatatataccaattccccatctagaacaattccacggcctcgtagacgctctaaaacagcaaacaaatcatccagcccctgataggtattacctgaacgggtatagattgctaatgtttccccgtcaatatcagccatcccacgagcgccatcgcttttaagttgtgcatacgccggatacttgatattagcaatagtcttatcagaacatgacgatgcaaggtggcacggttgctgagggatcagtttcttccataccttgtttgcagtggtagcggaacaaccgcattccagatcacgattcaggaccatcattgcaactttagcatcatcttctgacaagcaagtcagagtatcggtaactagctgtaatgctgcattaccagttacttgacgcgtggcaagtttatttttaaagacctgtaatgcaccggataaagacaatacagacgaataacgcgatggtttatcgtatttctttacgccaaacgtaacctgtttgcaatatgccagataaaaacattctttcagtgtttcattgcttgcagattctttcaggatcttttctttcagcgatgttttgtctgttgctgcaagctggttaatgatattaagaattgacattttcacctcgttttgttaaacgttcacgaatatcattgaggatactacaaaattccgattcagtcaatatagtctttaacggatcagttccacctatgctatgtcgcaatttcttatttccggtcgcgagtaatgctttacaaaattctgggttattccgtgccatcgtaacaaatgccagatgtaccagtctgtaataatgctcactcattcgatgaatcgggcgaccctgaaaatataacatgtgattctcaatcttttcagttcttccggttctttttgctttgccaccgtgcatcaaaaagatttctctttgtctctgagggttcttaaatcttagcccctgtaaaaatccttctgtgctgttaatatcgcaaccaaatagacggaatggtcttttattgaaattactcaattcacccgatggataaggtccacccgcatagatatcaatttcagaagtcattgaaactaatctcgctaatcagagagaacggatcataatcgtcattaggaatatcgatagtaatcgaatgaggatttacccatacaccaaactggtcttcttcggtgaatacttcggtatggatttcgtggatgtttacattcatagttttcataataaaattccttaataatcaataacttacaaaatcatatagccaaaatataggcgggattatttcccgccgtttaaaatcattaaccgtaaactaccacaatattctgtttgtgcgttacagtccatttcaggtcgatctcttcttccttcttaacgccgttaataacgtctggatgaggaactttattcatctttccatgtggcagtagaacagttttacccagcaattctttatctaccgtttcaccaatatcaataatcttacctaccagcggaatctcgcccatagtgcgcttttgctcaataatgatccccatagagctttttacttcggtccctgcgctttctgctttagcttcgataattacataatcaccaagtgctttaggagttttaacggtcataatttttattacctcttcaaatcaatacagtttaatgatgaattatttataaatttcgacgatctgcgctggagtcagcccgtctacattaatcagactatcaagcccaaaactacggaaaccttcaactgcaatttcatatactggcaaagatgtttctgattctttacgcggtttttcaacattaggaactaaccacttttcgtatgtttcaaacggcatcagtgccggatctcgcgtggcgaacatctcacggacagtaccatctttcttagtaaactgtaaagagtgagtacctacagcaagcattttctttagtgcttcacgaagtgcgatattatcaatttgttcagtcattatcaatacccttcaaatcagtcaataatgcttttggaatacgcgtaaccgtaatgtcggctttatccaaaatatcagcccaatcacgcccaccatttcggtcgtatgtatcgcaatagtatagatgtttaataccactgtttgcaattgctttagcgcaatctggacacggtgaagcagtacaccacatactagcgccttcaatcgatacaccgctacgggcagcaaacaaaatagcatttaattcagcgtggatctcgtttttctgtgaccatgcactatgttctggtcgtttttctgggatcattttaccgtcaccatccagccaaccgcttttatgtgcatgacagctacaatttacttgccctgctggagtgccattaaatccagtagaaatgattcgcccgtctttttcaattagtgcgcctaccttccacgaaacacatttagagttctttgcgattagataggcgatctgcatgtaagtttgtgacaacataatataatcctcacatattaattaaccgtatacgcgaaagtattctactgatccgtcgctatattgttttacattgaatgtattcacgccatgatcattgctcataatgacatacacactgcgacgctcatcactaaacgggttaactggtgctggttcaatttcaacattaaaaccacgtttagcaagtgcttcgcctaattgcttgagtttatcggtaaacattaaaagtctccgtagttaacctgaaaacattctacaccaattgagcggtacatgtcaaccacttgatcacggtcatctactgccaaaacaacatgatatcgcggtgcaatttcagagaagaaaatctctttctttacttcatgatcaggacgacgatcattagtttcacgttgaaagtgatcactaggttcaataccctgttcacgcaaccattgcagagtatcttcttcgcaaacatcctcacgccctgagcatgtaatgatacgatagccattatcacgatacagtttaagcatttcgaccacttgctgacgtggtttatcttctttgacctttgtccagtcaaacggatgacgaccgcccttatccgctaatgttccatcaatatcaaagatcactgcctttggcagcatagtattcggtttgtatacttcttgacccatatattcctgcatcagataaaattggttacgcaaatgagaaagtggaattgctttctcgccgcgatagaaattacgtttctttagtgtctcaaacggttcattgaacacttgttcagtatacaccgcgttaaattcttttgcaagttctttgtagaatacacgatgtttttctttcaggttggtatcagagataatgatactcaatccgcgtgatagagtctcgcgagcaatcattctctgaatagactctaccagcttttccttttccttagtatatttgtatttcaaaagtgagtcaacaccaaacaacataagacgaaggtcatcacgattcacattacgataattactaaaccttttacatgtttccatagcccatgtagttttaccggacccagaacaaccaacggttaaaatcacttcacatttcggcattatttctccttcggtttgcaccgttcctcattaagttcttttcgataataacacatgatcaacttactttcaagtgtatatctcttaatatccgcaagccagactctgaatttttgggagtcctcccacgacatagaaactctaggtttaccgtctattgtatccactttcaggtcaatgtcaactttttctattggtgctggtagtggaggatgtaatttcggttcctgtgaataatggtccattgtacacgaagaaagagcaaatacaataggtacagcgcagacatggattatggcggtctgaaaattcttatgtgctttcttaaacatccagtgtatcacgaaaattgaaaacaccatcaggataataatgcttgcacctatccccagataatcaacaagattaaaattgtttatctgctcttgcgtagacaatatttctatgctcatttagtcgcctcctttaattcttcggtaaactccttaaatgaatcattaagctgtttctctaccaacttgggtttttgtgctactacatagcctcgtgtagcgtctttcattgctttgttttgttcttctgcaaacttagttcttattccgtacatctccttttgtagtgagtctacgaccttcatcttttcatctgtctttttcttatattctgtaaattcctgattcagtcgatctacctcttttttattttcccaccacatattgccacccacccccagcaatacagatatgataacaatgtatatcagctttgacatattacccccaacgacaaaaggcggggaactagccccgcttattattaccaatcaatcttatcagccggaataagtttcttataattccgtagatagtaagttttcattgaatccataatacggtcataatcaagaccatcaaatgcaatcatcagacacatgaaaatatatgcttgtgcatcaccgtgtttacgtgattcgatagtcgcatttgatgcatatgtctttctgtcttctcccgcgtgtgcgttataaaattctgttgctgtcgtgaaggcattgcgaagaatagacctgaatgcttcctcgaatagctcgattcgttccattgcttccggttcgccttcatatgcagcacgcaaatcatcggtttcgctttctacgacatagtagatcaggttattaggaaacatcgatgtgtttttaatgttgtgcacaccaatataccattcactcttcactttgaacatttgaccgtctttagtgcgggcaacaattccttcgataccttctgcgatcctaacttcatcaagaatattgctaaaacgcgctgaatcaacctgtaacgcatttaccagatgaggacgtaggattgcgtcagcaaatagcatttgatgcggtacgtactctcctgtgacgttatggcgtacattcagaagtgttagcgacggttcagaatattctacaacaattcggttgctgggtgctgtatattcaaagttgaaagtataatcagacccaatatcagcaatcttagcgcgtagatccgcatacttctctgaatacagaagaccgtttgctctctctgcctggcttgagtacaaggccgctttagacttcaactgaacatagccgttatcaatgtatgtgcttactagactaccgtccattttgtccatgaccatttccacatcttccggcttaaagcgagcgcgatcattctcgcccaaattaaaaaacttctccataggacgagatgcgatgcggaccggacgacctttatcgtcaatttcaaacatgatcccgcgacactctaacgcatctggtttattccacatttccggtttgctcaagtacagatagctaaaaatgcgcatacgggtttgcatcgccgtaatttcatctttgtaatagaacgtatcagatccgtcacatagtgccatcagatttttgaacaatgctaaaacttttttgttgttttcttttgttgacataatttgtgttccattctggtttaaatttggtgatcaaaacaggttcttcgatatcggcagtgcttataatatctttacccgttggattctcaatatataactcaaagcactggcggtaatagaatgttactgtcttcccttcctctagcgccttatgaatattcttactcttgcgagtatccgccgttggtgtctgtctgttaatgctagtccggtaataattgatccgctttctgagattaacagtctgaccaatatataccagttcatcatcaaccacaatagcgtaaagaacatttaaacggttcttctgaggcggtagaatcacatcaccatctttacactctaaacatgaatatttaacgaatccatagttttctattagctcattaatcattatcctttcctcacgtcacaacaaaggcgggatttctcccgcccaccttattaactttccagaatatcgcgagcttcgttacgctccttgatgattttcaggacaaattccagtttttctttgttcagtgttccgttttccattgcttctttgacggtaaacactccgccaccttgcccgtatacagtgacagtgatttcacctaacatcgtggtatgaaaaccgccaattttcggtgattcgaaagaaacaattacctcgcggacattattaccgtcgttgatttctgagagggtaatgtcgtttttgtaggcggttgctttaaccatacggatcagcatagtctgatctggggagatggtcattttgtccattgcatgttgcaatgcagcgtaaccgaaaactttaacgaagtccagaacgtctttgcgagtttgaaatttaatcatcttgatactccttagtaagttagtttcgtttcgatgggggtatattactacccccgtttcatgctgtcaactactttttaatgacaagttcgaattttgctaccttgcgtcctcgtttattgaaagcaacccacggacggttttcaatgtagaacaattcttcaccaataatgaatactggctgattgtaaaggcgacccatcaggtcacgctggcgaatggtagtagattcgtatacttctcctactacaaagtgtttgctgatagagtcggtgcaagtaaatttcattttgattctcctttgtttcgtttcgatgggggtatattactacccccgttattcagtgtcaactactttttacttgttgtattcattccaccattgagtgagcttatcaattatttttgtgtttctatccaacttatcccaccgttttcgagggtttatcaaccggaataggtaaggtgtacttgttaagtggactcggtcaatatagtgattgatgtactgtttttcgattctaagtttcatctttttacgatgaaaatatgcaatgacttgttcttctgtttccatatgttcctccgtttcgatgtgcgtattatgctatggcaagatccgattatcaacacccaataacaaaaaagtcgccactatgggcgactttgaacaaacattaatcatgaccgtgatttgcaatatccgctcgcgtcttatctttgtgatttcctacgtcaaagacacgataaccattttcacgcaaaactttaatcacttctgggttatcctcaaagactccgacaacttcatctttatcaaaggatttaattacctctaatttgatgtgataatctttacgggaatcggtacggcctctcataaagattttatcaaaacacaccccgttagaaattaaccaatcaattgtttccatgtaagcatgtgaacttcgtccggtgaggatgtaaatcaaatgcccgttgtcggaaagagcattaataacacgaattacatcgtaaatgggggaatctcccccacatgccttgttatattcgatccatgactcgactttatcaagattttcggttggcatctttgctagtcgatgtgttggatctgtgatcgtaaaatctaaatcgacaaaatatatcatagatatttaccgaatcggttgtagtcatcgtctgttaaatcggtattaacctgagacaccagatacataatctctacttcttgcgccgcgttttgaacttcgtcagagtttaaccacttacgcatccacggtaacggatgacgacgaacactaaacgggcttttcagtccgacagcacgcatacgggaatctgccaggtattctacataggttttcagaatttccggtgacaggttaggaattgcccccattgcgaataggtggtctacccattctttttcttgctcgacaacatccagaaagattttcgttgcttcgccttcaagttcttccgcaatctgtttccactcatcaccatcaccccccgtttgccattgacgaataatgtattgtgtgccttttaaatgaagttgttcatcacgcgcaataaatttcatgatcttcgcgttaccttccagtaaaccacgttcggcaaagctgaaagtacatgcaaaggacacataaaaacggattgcttccagtgcattgacgcagtgtgcacacagataaatcgaagccatcagatctcgttttgtatcttcaaaaaatcttcttgcatcatctaattctgtctgatcgtctcgttcttcccaatagtggtggagaacttcttcttcccaatagcggagatcttcttttgcattctcatacttacgaatccaataaagaacatcatcataatatttcccgatagattccgctcgcttcatgatagcagggttatcgatgatctggtcgaactcactagccggatcaatgaaacagttacgcataatgtgtgtatagcttcggctatgaatcgtttcgctgaatgtccatgtttgcaaccatgtatcgagagttggatcagatacaattggaccaaatgctgcggacggtgcgcgaccttgaatagaatcaagtaatgtctgatacttcaagttttcggtaaagaaacgcttttcaacgtcacccatattaagatattgtatgcggtcggttgcaagtgaaatctcttcgggacgccagaaaaatgacaattgcttttcgatcagttcttcaaatacttgatgacgctgaatatcatagcgagcgatacccaacccactacccagaaacatcggttcgttcataatatcaacatgttcgcggttaaatacgctcattaattcacctcactatcactttttaacacaaaagaacttagtatttctgtttatttcgttatcctgttgcaattcctgcacggcttcaaaacagctttgatgtgatgaaaactccacgctggtaacagttcctttattatatgatcctacgctaacggaaagcaataaccataatgtagccattagttcaccttttgtttttcaacgcaatatagattcataaagcgtttattgtcttcacggataatctcgcgagctttaacgcaatcctgctttgttgcaaactcaatgcttgacatatttccgtaattatacattgaattgcttattgcaatcaataaccatacagtagccattatcctacaacctcaaaacatttatcatcgggaagaatagcccattctacgccgtattcatcctcaacgtagtagcaagtcccatcatatcgagcctcatatacatcaccgacaacaaagctatcagctagctcaaaatctacagcaacacattttaatttggtcataataaaatcctcacttgtttttgatggttgtattatagcggggatttctccccgcgtcaacacttattttacagcttgcaagatgagcactcgctagcgtcttccgtaccatctgcaccgtcgcgaacgttcgcataatacagggttttcagaccgtaatgttgagcgaacaacatatcatctaacacatcagcaatatcgactttaccagtcttataagtgcttggatcataggatgtattggaactaatcgcctgatctacaaacttctgcatgatcgctgccagtgtcagatagggcttgttacctttcttgatcagtgtccaaagcaggtcaataacatcagcattattctctacgttcggaataacctgattaaattgcccttctttcgatcctttaaccgatacaatcccgcgaggcggttcaataccgtttgtgctgttagatacctgagaagacgactcacaaggcatcagagccgaaagcgtactattacgaatgccatattttttcaggtcttcgcgcagttcttcccaatccatctcatacacaggatcaaccagttcatctactgtctttttgtaccagtcgataggcagttcaccgcgtccataacgtgtttcgtgcatcagttcgcaagcacccttctctttagccagttgcacactagccttaatcagagcatattgcaagcgttcaaacgttttatgcgtaaactcgttagcgtcttcatatgtgaagaaattatccgctagatatgacgcaaagttagtaacaccaacacccagagagcgacgttttttggctgtcagagcttgttctacaggataatcctgataatctaacaggttgtcaagtgcacgcaccataaccatagcaatgcgttctacttcttccatgttttcgatatcgaaattacctaaaacatatgctgccaaagtacataggctgatctctgaatcatcacgccccatcggtttagtaggcagagcaatttcacaacacaggttagattgtttaattggtgctacattacgaataaacgccccgtgattgttcatgttgtctgtgaatgttgggtagattcgaccagtgttaaaacgttcaattgccaccgctaaaaacaggtcttcggctttaacacgagttttacgaacactcggatctttttccagtttttcgtaaagctggcggaaaccttcctcatctcggaagtacagatcccacaacaagccacctgcaacatctggactaaacagagtaatgtaatcccgtttaaggaatcgctctaccatcaggttattaatctgtacgccgtagtcaagatggcgaatgcggttatcttccacgcccttattgttctttaacacaatcagactttcaaactctaaatgccacattgggtaatagagagtcgccgccccgccacgaataccgccttgtgagcatgacttaacggcagtctgaaaatgtttccagaatgggataacgccagtatgacgaacttcaccatgcccgatcttagatccttccgcgcgaatcatgccagcgttgataccgataccagcacgcttgctaatatacttgatgattgcatttgctgtttcgttgatgccctgcaatgagtcatcactttcaatcaccacacacgaactaaattgtcgtgttggagtacgcacacccgccataatcggagtaggcagagagatttgcttattcgcaacagcattataaaaatcaatcacatgttcaagtcgattttctgtctcttcttgatgcaaacacataccaatcagcatatacgcaaattgcggtgtttcgatgattttcttagtgctgcgatcctgaacaagatatttctcttttaactgcatcgcaccagcataggtcattttaaaatcaagtttatggtcgatgaatttctccagatattccacttcttcacgggaatatttttgcagaatttcgcgatcatattttccggttgcaatattacgctcaatatggctataaaaatcaataggttggaattgaccgtatactgatttacgaagcgcgaacattgcaaggttacttgctacatattgataatcaggcgtttctacagtaatgttatctgcggcgaccttaatcaatactttctggatatcattggtagacataccttctgtcagaagtggttcaaccatatcaaacaattcatatggatcaacgttatgaccttcggctgccgcttccagaattttcattactttttctttttcaaacggaacagtcagaccggaagacttaacaacatttttaatcatattacctcacttcatattttagcaggaacaagtttatcctccatattgggggctttcgcccccttttgtttatactgccatttgagcggtgattgctggatggctttgatagttgtgaattttaaagtctttcggagtctttgtcaatacctcatctaaagacttaaattccggcaactcaattgttggtttatcaaacggaacacggcttaactgttccataacttgatcaaaatggtttttgtaaatgtggcaatccccacactgataaaccagttcgccaacttctaacccgcaaatcttcgcgatgatatgcgttaacagtgcatagctcgctacgttgaacggattccctaaaaagagatcattcgaacgcatgaaaaataaacaactcaatttgttgtcgttggaaacataaaactgtaccatcggatgacatacacctaacacagcattatgcgtttcctgtacgttccatgaatcaatgataatacgacgactatacggatcattcttgatcatgtcaataactttttgtaactggtcttcccaaatcttcgggcgatagacatattcttcatcgtctttagtgcttgatgtgtctacgtccatactagcaaagatcgtggtatctggtgctaaaatatccccacccagataatcactatcaagcagataaccgaaataaccatcatctacccattcctggaatccccacaagcaatatgcatcattaacaaaattagattgagtcttccagtgatcggctactaagaattgattatattcagaatcaaactcttcataacgcataccacgccagatagcacataaacggtcttctgtttcattggttggcgtaaagtcttctacccacgggtgcttaaatgtatgtgcatatttgctcttaactcgcttaattttgatttcaccgtgtggatgaatcggtttgcgtcgccacgccataccatacatattgccgacattataaccattgaatcgcaagggattcttttctttcatatcaagacagttgccgcgccaaatatcaaaggcttcctcgtcaaacttgccgcgtgtaatttcctgtaagcgacggcggtcaagtgatccctccataaaccatagcaattcgccaattacagaggctgtagccatctttttagtggtcagtaaggggaaacccttgcttaaatcaattcgcatctctgcgccgaatttagagagcgtacctacccccgttcggtcgtcacgaggccaaccattatcaagaacatcacgcaatagtttcaaatattctttcatcccacatcacctttttcttattgattgctttcttacgcagttttgctactgtctcgtcaatgtctataaagataacaccacggtcgaatacagtaacaggtcttgaaatgtcgctattttcctgtactggaagccatgacgcttgagcttcatcatagagatattgtaaaccgtaataatctacggctactgcgtagttttcactggtagctgaccataattgaataataccgactttcattattgttcccgtccgcaatgtaaacaccgactaccagcaaacatcaaagattcaccacaatgtttgcactcataatctgtcagaattttcatgttacgccttcttacgttctaaaatttgttcgctgatcaggtaatcatcaaggaagtaattatgttcttcttttgttgcaaagtcaaaatataattcctgaatcatttccttagagataccaacatcatattcgaacggatcattaattcctgctcgttgaacatacgttaatacaatacggtccgcaaagtcaaccgctttttcaatcagggaaggtccgccgataacacttaccaaaccttgcgttttctctagggcttttaacagatccttcaattcaattccagtatacacatcaggttggtcgccgtttttagctttcggttctggcttgttggtatcggtgctaacaaccacattcaaacgtccccaaagtgctttaggcagactttcaaaggtattgcgtcccattactaccgcagaaaaatcaacctcaccaatagtgcggatttgaaagttttccatatcttttttgattggacgaccccacggtaagccacctttaaaaccaaaagcccaattttcatccgacattttagtgttaccaatcgcaaatacacattgaatcataatataatctcctgtcaaatcagtttaaagaagttttcgtttacattttcttctgtgatctcggttttaaattcattaccatcatcgggagaaacataatagcgttcggaataatcacgccacattttcagtaagctgacaccaacattaacaccgttttcccagaaacggaatacaattttatgtgcggtgtaacgataatcactttgaattaagctgccatccccgcgacgagattcataaaccgtaatacaatcgcggttagcggcgttaagacattcttcaatagtcccgcatgagacaatttcggttgattcgtctacgattttttctactgtccacataatataatcctctctttgtttcgatgtttgtattatacactgttgcgttacgctgtcaactctttttcaaaagattttacgatatacatgatagtgctcaattcagacggcgctactgtctctgtccagccatccggcatatcttctttcgagatataggaagttttacctttcatcgcttccttgattttgttttctaattctaagatcttttgaccatcttgtaaagtcaattcataaaagatctcgtgatcgaactttgaaacacgagattggtttctcatgcgctcatgtgtttctttgtttgttattccaaatttcacgccaacaaaggaatcattgttggttaatttctgtatataaagagttcctgtctttaatgcctgataaccatgcttagaacacaacgggcagcgtgttccgcgattaacaaaattatcaatagttacaacccattcatggttacgttcgcatgtcagaagtattcttgttaatgcacctttccactttcctgaaatcccaataaattttagtctgttggtttcgcatattttttcaatttgttttaatcggtcactttttgttattggtgctgttccgctacatttgtgacaccgacgacctagtttgaacttatcataactttgttcgtaaatgtgattattaggacactcaaatttaagtttagtttttgttcctttccattccccaattatacccaaaaatttataatctcctttattttcatttatataagataaggaatcttctttatcatacatcttgccaccgttacataaaggacatcttgttttttgatgaatgaaatctgtatatgttggttggtatgtgtgtccgtttgcacagttcataatgagtcttgttctgctatttttatactccccaccaacaaaaccaacaaatacatcgtttgtttcttgttttattctttctatcacatggtttaggtttaatctttgagaatcaaccacacatttcttacacgaaacttttttcctgatatttgctagagttgatgtgtattcatgcttgttattacataatataagagcttttgttttgagaccagaccattctccaacaaaccccatgaaagaataaccaacttccaaacatgaattttttacaacattttcccaatagaagggagttttcgtgtttccttttatttctatacgaatctcatgtgcttgacgtactaacataattttatcctcctttgtttcgatgtttgtattatacatcctaacatcagcatgtcaacacctttttcataaaaatttaggcaataaaaaagcctccccgaagggaggctgtaaaattcattacatcgctaacagagaatccaggtcatccagatcagaagcggaggaagtaccgccacccagatccagagatgccatcaggtcatcagcggaagaatctaacgccgtgctagctgcgttaataccaactacagtgctagctgcggtcataccagaatcgaatgcattcatctgtgcgtcaaaatcgtcaagctggctgttaatcgctgccgcagcactggaagccgcagcaccagctaccatagaaacgcccatagttttcttaaatttggtttccagttcatcgaacggtttaaactggctaggcgctacaatctcactcagatcaaccatgttttccatcagatatttctgatatgcttcgtcttcaattttcggaagctgtgattgctgcatgaaacgagaatcatcatagttctggtgtttatcaaccttcttagctttcaggaggaagttagcaccagagaacacacaagttacatcgaccggaacttcgcccatatcggtattcacgttcaccattgcaacgatcttatcataaattttctgaccgaagcggaatttgaataccttaccttcattttctggtgcttgaggatctttcagtaccagaatgtttgcgtagtaagacgctttacgcttaatcagttgccattcggttttatcggtattgtacaagtctttttcgttaatatatttgcacacagggcaagaatcaaaatcaccgtgggtgctggagcagttttcccaataccatttgccattaactttgaaggaatggtttaccagtttcacaatcggcagaccgtcttctgtcttagacggcaggaagcgaatcagggcttcaccgttacctgctgcatcagtcttaatcttccactctttcggatcttctttggagaaaccgttgccacctttcagtgcggccagttgagcttgcaatttggagctatcttgacgacgaaacatgttcataattatacctctttatacattaactattgattaatttacgttttatactatatcagatacttaattgcttgtcaatactttatcaattatatctaacagttttggctttctattttcaaattctaacatctcttcgggagaaatgtcaactacttctgttttgttgaaaaagtttgggtctatagcatcagcaacaaagtttctcgcaagtgctgccgctttctcatgaacatatattcccaaatatatcaacttctttctttcgacctgaatattggcaacatatttaccatctcgtttataaagactaacaccgatatattcagacgatcgacctttctgtttacccatatttcttgagttttgttgctcgttcgcatctctcaagttttcaatccgattatctgttataattcggttaacatggtcaacgtattttggcatgtatccatgatgcataaagaaaattattctatgctctttatgatgtttaccatcgatacacaccaatctgtatccatgactaggattaactccacccgctctagatccgactttatgctttcggtttgtcgatatcttgcgaatcagcttaccgttatcatatttaaagagttcatgacaacgagcatacaattcaggatcatatgttttcaccttttaacctcgatatttctttacactctttaactactttaacaaataatgctcttgcttttgcggcgtcaataacaagtagtttcttgtacgccttcattttaacactataagtttgccaaatcaagtctttggctaccttgtcgtgttcgtcgattatatttagaaagctatctaacaacataaacgactcaaacgatataatccgattttgcagtagtttaaaaataccgcttgtttcggttgcgggattatatgtaattagctctttaagagtaaccccgcgtttctcggagaagtataccagacttttaatgtcatcgtcaaatcttgttgctgcatcggttatctttcctatgtattccatataaaagccgtatgcgtcaacatcagtgatttcacctacccatgcatcggtattggctaccagattgcttaggaataggaagtataattctcttagattgtatttttccgctaatttcgcgaaataatacttatctctgcgtttattgaatgcggcatcagataaccgcatcctccaattatattttacgcaatcataacgcccgttcatatgagctttcatcatgcaatataacatatacacagatttagcattaattcgcatatctggatctggaggaagacggtttctgatcatacataccccttaaatatcgagagtgttggtcggttcgtcgatcactcccttcctgagtgttctatttactatacattcttgtgtgatcttgtcaataatggacaccggaatatacttctgatagtgaccatattctatagagttttcctctacaaactgagtggtcgcttcaagataagtcaatccctcttcaacaaccagtttttcgattgcaagaccgtttgctgttttgttcgcggcttttaccgcatgttcattaagcattgaacacccgatcatagagttctaccgcttcatcgcgttctgcttcgaaggtttcgcgctgttgctggtgatacagtttaaacagaatgccccacattttaccatctacgcctaattcttctttagcacgctgtttgatctctttgatcttatcgccatatgcttcttgaatggttttctgatcgctggcttctttaatcagttgtgccagggtatttccgtgtacattttcatcgaatactactttttcttttttctgttcagtcataatatttaaccctctttcgtcattaattgaaaaccacgttcagcttttgaaatttcgctaggacttaaatcgtcaccaacatatcctagcatcatttctcggataatgtcaagtgctttttcatcacctgattttaactcgaactcaagttcataattcgcgcttgtgttgatatatctacctattcctgcataattaaatgcatcggtgcatatttcaactacgcctataccagtatcaattgttcgagctactctagctgtcataacataaaattgcggtctaagttgtgttaagttaacacccaaacaattaacaaattcagaaaaatcttgataactacaaaacactatttcttctcggttaaataaaccgctttcgtgacttccatgttttattagaaatttatttgtctttttgtcaagacgtgcatacactccctgtttatgtaaaatatattcttcgtcatcataatacgattctagcttattatagatttttctgtctacaatactataacaatcatataacttagaacatgcgtcaaaaatagacttaagccctttgtttgaccttgcatagtattttaattcaagttctttcatatgtcaacccttagaactcaccaattttctgcaacattttaactaacgcatttgttacaaaatagttataaatcttaccgcgtggtgctggtttagatttctcccatgactccaggatctgattctggatattgtctgggatctcgtcaaagtcaatcaactgacggttttcatcaaatcgacgtgcttcttcctctgtcatcaaagactttggatcttcggcatcgaaaatttgctctaaccatttggttgcaattggtttagctcgttctccttccagtcgtgagataatgaaatcactacggcacttgatcgaagctacaccgtcttttgcgtcacccttaacacattttaccataaggtctttgtaagggctaccatatttgcatttcttccatgctttctgtactggcgcccactgtttcacgtttttgtatttgtgcaactgtgtgtagtcaccatcgccggagttgattagcacctggcgaccttctacagaaaactttttagttaacacagcgattatatcatccgcttcaactttgtcaaccttaataacgtgataaggcatgttctctttaaactcttcggtgatcttattgatcgcagcaaagatcatctcccaatcacgcggatctgcgtctcgtttttccttacggttgcgtttatagtaaggggcgatatcacgtcgccagtaacctttgcttgaatcaaaggcaagtaccgtaattgggtattgctctttgaattttgtcatattataacgcatggtgtcaagaataagatgacggatcatgccttcactaatagggtcttccggtttaaaggtatgcgagatagtagcaatcataagctgcgacatatcaatcaaatgcacaccttccggcagtttatcttctggagcatcgaagaaatcattaagtgtagcggtagtttttgtaaacgggttatacgtcataattaagttctctccactctcacaacaacagactcatcaaacgagctagatacttcacgatcatacccgtatttctccataactcgcagaattgcattgtttaattcggcacggaaataattgtaatccttatctgggattctgtcaactacccattttgcaccatctgacaaatcaaatttaaccataatatatcatcctcttttgtttctatcaagccttattttataaatatgaacatactataaaaggagacccaataatggcagatttttctcaacatttcaaggccacatttggctttgatgctggtaatgaaaaggtcgtcaatgtagcattggctgataagaatgtcaacaccgatgcggtcaacgttgaatttttcaattaccataatggtattactcagtatgacacaactcgcggttatgatcaatacggaactacaatctatcaaaaccgcccgtattatgcaaaagaagatatcgcaaaaccagcaggtgactttgacccgactaaatggcaagcactgcgcacggacccacgttgggattatgttgcagcaacttccggcgatactcctttaaagtccggtgattatatcgcagcggactgtcagtttgcaaacttgacattctcaatgcctactaatccggcagagggcgacactataacagtaaaagatatcggtggcaagtgcggtgttaatgagttatcgttccttgcggctggtcatgagttctatcataacggtgtggtaaacaaccgcaaatggtattgtactaccccttatgcaatgaactacttcatttttgctcgcaatcgctggcacgtttaccagacgggaacggagccacgcggggtatatgcacagccatctattgatccgatccagatgcaaaacggtgatcaggtattccgccgtagttctttgggtaacattgttttgatgcttcctaagtttgctaataacggtgatatgatccagactaccgatcttgacggattgactgcaaccaaccatgttacggtaaaagtgcatgaaggtgcgcaagaacaatcgatcggtactttcggggtaaaagaaattgttggtaagcgtagcggtcatggtgtattcatctttgacaaaccggaaaacttatggcgtttgtgggatggcgatcagtctgttcgcttgaatcctatcattagtgatactcgcttatcccctaatagctatgttgctgtatttggtgatcgtgatgttaccttgactttaccgaccaatgtcgagccgggtgatcgtattcaagtttctatgcagtatatgcacggaaaccagacttgccgaatcattacctcagaagaggatacaaaaatccttatgcagaaaaacatggttcagtttcctaagcgtagcgagtacccattcaatgggaccgatacatggacgggagtgtctgaattgtctttcaacgctgcaaatgattatgtaccttatctggagttctcttattcagaaggtgatgatggtaagaaatactggttggtggcacatgctcacccgattgtagaacgagtagatccgactcgtaaagatcgtgttggtgtaattgcactggctacccaggatgaaacaaacaaaaaccatgaagataatcctagcgacgaagttgcggtgactccaaaggttctggctaacaaaacagccaacgaaactcgacgcggtattgctcgcattgcaactcaagcggaaacgcatcaagatactggttccagcttcctggatgatgttatcgttacacctaaaaagttaaatgactgtgttgctaccgaagaccgtcgtggtgtgatggaaattgcaactcaacatgaaacaaacgaaggtttagacgatacccgcgcaatcactcctaagaagttagaagaacgtcgcgcgtccgaggatcttgctggtatcgctgaaattgttcaggtaggcggtaatgctgccgctctaaggggtgaagctggtacagggatctataatatcaatgaccatgctaaaattgttacaccgcaaaacatcaacgaagttaaggcgaccgaaacttcccgtggtgttgggtatctggcgacggatgaggaagttcaaggggcgactgaatcaaccccacaagatgcattgcttatcactactcgcacgttaaccaagcgtactgccaccgaatcccgtactggtatcgctgaaattgctacgcaggaagaaactaacttaggccaaagtgacaaccatatcatcacgcctaaaaagctacatactcgccgcgcaacggaaactttacacggtttagcagaaattgcaactcagtctgaatttgacgcaggtcgtgacgatgctcgcatttctaccccattgaagattaaaaccttctttgagaatgcacagcgtttgaaagtagatccgactcaggggcttaaccttactggtgatttgtggcaaggtatcatgatcagcggtcttgatgcaaccgaagatacaaaaggtgtcgcgaaagttgcaactactcagcttacagacgcaggagaagatgacgctacgatcattactcctaaaaagctgcaaggcaaaaaggccaccgaaggtaaagaaggtattatccgagttggtactcaagacgaaaccgtagctggtactatggacaatgtagcaatttctccgaagaacttcaaatatgttgttcagacagaggatacatggaaagcaaccgaatcgcgtcgcggattcctgaaagtagcaacacaagaaaactgttttgttggtgacaatctgcaaggttctactcaagatcttgataactatcagcatgacgggattgcggtaactccgaaaggattaaactacgcacttgctaatttcttacctaagatggcaaccgctcagaatagtttgaaattgggtaacgtagaggccgctaaatgggcgcgtagagacattgaccagaccatagagagcaattacacgtttaataaaaacgttaacgtgaagggcgatttagagtgcttaaaatcaggttcctttgaaactctgtctgtgactaagaactctactgatgatccgagtaatggtcatctggtgttgggtgagcgtggagttgacggtcacaccggaattactctgcatggcacaaccgcatcggaaggcatggaaaactcatggtctattatcgttggtggcactggaacatctcaagttgttgatagtaatgctatcgctttcggtaaaatcaatgatggtggagtcgtcgagcattacgcctttgctatggaacacaatggcgacgcgacagcatatagagactttattgcaggtcgtaacctgtatgcgaaacaaggcggtttatacattgttgatcagtctaatccggcgatgactcgctcagaagacggtatgttgaatatcgggcacggtggaagtgttaacatcaaagcaggttatcagacgcttactacagagattgccggacagaaatatcagatcgtccacgcaggaaacgcagacgaagttcttaatcgtcagtttgttaagaatgctggcgatacgatgaccggaaagctgatgatggataatgcgtctattgtatcagttaagcatgaagcgatcgctactactgcgccagcaattggtaacattggcttctggaacatgcgagtaactacccaaaacatcaaagaaacctacccagaaaagaaaaatggtacattgatgcaatggggtactgatgaaaacggccttacccaaatctggtcgcctgatggtactcataagcattatatccgttctggtacagatggtcaatggaccgcatggggcgaaatttacaccaaacagaacaagcctaccgctcaggaaatcggggcagtggttgccgaaggtggtttgatgaactctatgacggttcgtgattggatcaaagttggtaatgttaaaatcatcgccaataatctgactcgtaccgtagactttatctgggaagactaattaaagggggctaaagccccctatggggttattatgacacaagagatagaattacgcaatactggaattaagtttgcgcatttcgacgaagactccgcgacatttacaagcatttcagaaaacaactctgtgatgtataagctggaagtgcgcggatctaatgcagattctaccaaaccagcaaggattagatttaatggagcggagatcgttggtactggctatgaaaatggcctaaattttaaagttcttactccaactggacaactacacgaagaaaaggtattctatggtcgcggtgctgttttggcaatgcgtgattatctttctttgctgaaaggtgactatatcattgcgatggcaacgcatggagaattgtttgcagatccgataagtgatgttgtattttctaagatgggatctgtatcattcccgaatcacattttgttacagcaaatgcctcgtgtatcctatgcagcaatttattctactaaaatgggtaaaattgtgtgtgaagggatgcaagcaacgaacggggaaggtcaagattcgtctatacagatcgagaaagtttatgatactatagacgatcttgcaataacaggaacaccacaacgatttttagattatccggttgagtatgttagcgaagatgccgaacatttcgagctaatacaatggcctcatgatgagatcagcgcaccacttgaatattttaacataaaggcaggtgacaaactatcaatatcctttgaattgttccgtgatagtgccgcagccgcagccaacgtaacagcgcgtttctatcacaactacttcactgatggacaatatcaaactggcgttcgttataatgccagccagaaagatcaatgggaaaagtttgaagccgtctataccgtaccggaaggagttgatagtgttaccactggttgtatcagatatccaaccaactcaaatgaaggtattgttaaaattagaaacatactaataacgccgatcagtggagtcgtcaaaactactggtcctacttcatttggtgttaatggtgttagaacaactcatattcaggataacggtgattttactaaccctgtaatgagtcttcttaaactaccaagagacaataaacatatcacatccaacaactttaaagagtttgatgttgattaacatttttaacaagccgatcctcgtggtcggctttatttttatacagttggttaaaacataaccaaaacgaagaaagatctttagaataatagaaaatttgtttcggttaaaaagtagtcagtgcctccggcacgtcgcaaagcgatattttgttaacattctataaatactcggaactataactaatttttgaggttactttatggcagatttgaaacatggatctactgtaggcggatctcccatttggacgcaaggaaacttgacgatccagccagcgggtgatcagcttttctacaaaggtcataaaatctataccgcttttgataaaccttcggctgccgattttgatgctgttagtgcatccgaaggtggtacatttcagaaactggtccattttgaggaaggtttaagcgtaggtagcgcatccggtggagaaaccaaaaagaacgggatctttaaaggaaatagtgatgcggctaactttgatggtgtaagttggggtttgcattcgtggaaatctattggttttgttaatgctcgtgatgatgttatcatggcttatattgacactaccacaggtgattttaaaactaaagggactatcgaagggacaaccattaaagacacaggtcaacgcgtctatagccctgttaataaaccaacgaataatgatttagatttggtgtctcgtcgcggtgataccctcacaggaacatataatttaaacactgtcactgttaaactatcggttgattctaaattaattgcaagggaacgtgatttaattaattttgatgcgactaagatctattatggtaacgttcttgatacgttggtcttccgaagtaaagatgagcctaccatttttgttaatggcagagaaggtcgtttttatcacaccaacaataaaccaactaaagccgatgttgggctaggcaatgtcaccaatgatgcacaggttaaacgtgctggtgatattatggaaggtaacttgcaagcgcctagaatgttggcgacaaacgatcctgctggtcctaatgaattggttcgtttgagctactttgagagaaaatcaatggtagcaaatccaaccatcattggaaacgttgattggaacactcttattaatcgcggtatctatcgtgtggaaaatgctgggtcaggtactaataaaccgtctgatagctattataacggcgttttgatggtatatcgcccagaagatgcggtcggtactcgtcgaattgttcaggtgtattatcctgaatctattgaccatccgatgtgctggcgttcgtgttctaatgaatcatggactgcatggaactatgtagatcaccgtaaattggctgatattcgctatgttaacgtcactggcgataccatgacaggaccgttaactgttccggctgcaaacggtgttcataccgcagaagctaactataatggtgataattgctacgctggacttaatagcttaaatggtacagcaatgatttatcgtgttagcgatattaaagcgcacgagaaactaggaatcacacatgattctaaaattattttcgttaaatctcgtgacaatactcaggacaccgatacctttgaattataccacgaaggacataaaccaactcctgatgaggttggcgcggttccgctcaatgcggtaattgattttggtactttctaatattagcggggatttcccccgcttttctaaataatattattctaataaccgtttaaggattttataaaatggcagatttaaacagaatccagtttaaacgcactagcgcagccggacgtaaaccggatgctggtacgatgaatccgggagagttggcaattaacttagcagaccaatatctgcttacaaaaaatgatggtgggcaaattgttaatttaagttgcccgccagtttatgacaagagcgtagatcggaagagcacaccgtctgaactccagtcaccggctatgatctcgttgaccgccgtggtctacacggccctgaacactctttcctacacgacgctcttccgatctgcagatttaaacagaatccagtttaaacgcactagcgcagccggacgtaaaccggatgctggtacgatgaatccgggagagttggcaattaacttagcagaccaatatctgcttacaaaaaatgatggtgggcaaattgttaatttaagttgcccgccagtttatgacaagagcgttaatgtaaaaggtcgtgtggttgcagatgaccttatgtggagtaataccgcaaactatttcgatgacccaaccgcacggaatcttgataaattcggtgcatttcgtactaatgatatggatggtcatctagcattggctttgcatattcctcatcctagcggtataaaccatgctcgtgggttggattttacttatggttctaacgttgttcctactgtaaaaacctatggttataacgctgatggtgcattggcatattcatatcgcatgtatcacgaaggtgataagcctagtccgtcagaattaaatgtatacagcaaacaagaagtagatcggatgttccagaagaccatcaactttggtgtagaaactggatggtttaaaattgctacagcatttattccgcaaaatgatggacgtagcttgaaaattagattggttggtggaaatgggtggaacgtaggccaaacgggacaatgtaatattattgaacttgttataaggactagcaacggttcccctaaaggaattaactttgttgcatatcatcatgtttctggttacgaaaatcaattttgtgccattaatacaggtgatgacacttatgatatctatgcatattactacgaatttactaatatggtattggctgaatatcaagcgtccagcgatgttaatttaactgtatttgatcgacctgaatatgtaggcgaaaaacctgtagctgatcatatctatgatgcatatacaatacgctcctttaacagtttcagtaaccgtggaacattaaattttgctggcaaccatcaaggccaatatgacattgagcatatgaacgaacaaccgacaaatgctaaaaagatgttgcgtcggtttcgaagctctgccagcgcgacaatctggcatgaaaccgttgatgaccagaattatcgtcttgccgctggaagtacagactcaagtcaacaattattgttgtctactgggactggtttgcatattcgtagattgaccatcgatggtggcttaggttccggttctaatgctggtattgatattcgtcgaggaccaaacgaatcaagccattttaattttatggattatcgcactggtcaagatgttcgtaatggttggtttggttttggtgatttgacgaccaaagattttatttggtggaacgataacggtcaaaactcgataaacttgatcgaaaacggtgaattacatattactggtggtaaaggccagaaaattgtaatgaatagcgaagttgcattatctgaaaatgctcgtttggctgttaaaggtggtaattatggtttgttgttccgtaatgatggtgttagtttccatatactgactactaatttaaaggattcttttggaaattggaataatcgtagaccatttagttatgattttgccgaaggtggattggatctaggtggtactgaaactgctcgttgtttgcatctggggatcgatggtagtacccgcatcgaagataacttagttttccgatctgggtcgcgtcaatcaatggactatattgaaatgatccattggggtaacagtaatacaggacgcaacaacgttttgagtatgaaagactcgaaaggattcttggctgaatttgagcgcaccggaaccaatagcattaaaactagattctttggtgaaacattcactgatggtacattatacctaaatcagatgaataatagctctgaacgattctctatcaataattggggaaattcagaagttggtcgcgcggcagtcttagaagttggtgattctaaaggttatcacttttatgctgaacgcaggactgataatagttctttgttctctgttggtggtgctttgtttgtgcagggaccttccgggattattatcaaaaactctgctggtgctcgccatgtttggtttaaagatgacggtgataatgaaaaggctgttatttgggcgaccgatgaaggtatattacatctacgaaataatcatgatggtgcatttagtcatcacttccagggcgcaatgattaaactgcaagggcgtgttccttatgatgcagcaaagggaattgttcgtggtgaagtttctggtggtgcatatgttgcatggagagaccgccctgctggtttgttagttgactgccagcaaagtgttgatagtgctcatgctgtttggaaagcggttgattgggggcgtcaatatatcgctgctatggacgttcactgtcctggtgatggtaataataccgcagccgctgttcttcatgttcaggctgctgattatcaattccatgcaagcggagaatttcatgccagtggcaacggaaactttaacgatgtgtatattcgttctgaccgtcgccttaaagacaatatagaagattatactggaaatgcgttaagtttgattggtaaactgaaagtgaaaacttacgataaagttaaatctcttaaggaccgtgaaattatcggtcacgagatcggcattatcgcacaggatttacaagaaatattaccggaagctgtaaaatcttcaaaaattggcaatcttgataatccagatgaaattctgacaatttctaactctgccgtgaatgctcttttaattaaggctattcaggaaatgagtgaagaaattaaagaattgaaaacacctctctttactaaaattgctcgcaaaattagtaaatattttaaattctaacaacaagggggcgttgccccctttggagtataaattatggcagtagttggtgttcctggttggattggaagttcagccgcaaatgaaacaggacaacgttggatgagtcaagcggctggacaattaagattgggtgttccctgctggatgagtcaatttgcaggtcgctcgcgagaaattattcatactgtaggagcaaaccacaattttaatggccagtggttccgtgatagatgctttgaagctggcggtgcacctattgtattcaatattgtcggtgatatcgtttcttattctaaagatgtaccacttttctttatgtatggagatacacctaatgaatatgtggttcttaatattcatggcggagttcatatgtggggacgaggtggtaacggtactgtaaacggaaacccgggcacaaatggcggcgatgtaatccaaaatgatatcggcggaagacttcgtatttggaactatggcgttattgcatcaggcggcggcggtggtggtgcagtgtcattacagaatagctgggcgccaaatgctacagcaggtggcggtggtggtagaccatttggcatcggcggaggcggcgttaattggccgggtggtaatgctagttatgacgcaccgggcggagccggttacacttcccaattcggcggaggcaatggcggtgatgctggaggttggggtggagatggatggggtaatcacttatctagatccggcggtggtgctccaggtagagcggtattcggttcttcaccatcatggggtgctgtagggacaatttatggatcttacatttaaccgttaaaaaagaattaaggaaaactcccacggaagggaacttactaaggagaaacggctatggtctataatatcgtcattggtgctttgtctaatttcggaatgaaactattatcaaagttaattagtgaaaagatgctcactaaaattttcttctactgcgctcgtcgtcttgcggcttataccaatacgccaattgatgatcgttttgtggaagaactttataaggagtttaataaagatcagtcagaagatagtaacgagcaagataaacctagtgatagtcaagtacctaaataagagtacactgtcatagttattttagggcattatatgcaagtttctgaaaaagagaaagactttgctatctcaaatgtcctgcgcgctattttcacaactaaaagcacggagttgctcgtacttcgtgtttttgctgccgtcgtgttgtccatattagcatttgtcgtttatagtaaaaacgagttatttgccttgtataaagagactcgttatgagacttatgctcacgttctccaggtagagaaagaccgcaattttgataatgcagcacaggagcagttacagatagttcatgtgtcggctgatgccgatttttctgctgtttttagttttcgtccgaaaaacctaaactattttgttgatttggtggcatatgaaggaaagctaccacatacaatcgatgaaaagaatttaggcggattccctatcaataaaacgagtgaagaatatcgtaggcatcttttaggtaaatcatattttaccgataaagatttccagtatattccatcgagggagaaaaaattagagaatatcgatatagggtttatgtattcttgtcctatattcaatctcgataatgtctattctggtagtattgccattgcatggaagaataaaccagatattgacattgagaatttagatactctttgtaatcaatctgccagaatcctcggaaggattagataaaattaaaggggaagcctttcggcttccccttctttttttattgacgcatagacgcgcctgaatcgcattttgacgctgtgtgatgaaaacaggtagcgtaccagtcatcggcttgtttgtcttcgtcagaaaacgcgtaatttcgttgtacgccgttttctactttgaccagtgcaatagctgtttctggaagatcaatcaatcggacaaaatcgccatcttcccattctacacgagcaatatcatagcccatctcaaagtatacaatcgcttgttctaatttcattctggaaacttcccgtaaatgttctctgccaacatacgcgcatcgctaatgatatctttcatgctatgaccgtagtgttcagccattgagttgacacaatcaacaaagaaattataacggcgacggtttaagatttcttctctgttatagttttcatatttgacggtcgagtgtgctttctcgattgccttgatcgctatattgacttcattgataatggttttagcattgtatgcgccacgacggatcaggatatttgtcaattctcttgcaatatcttgcaattcttcatattcatgttcaaacataatcaacctctcaaaatacaatccttacagatgaaaacctgttacaattaccgcatcgatcgtaccgctaggaataaacggttcaccctcttttatttcaactttgaattgatgccatttcgctaatacttcttccggtacacccagcgattcggcgtctgctttagtttcatccataatccaactaggctgcatgagagcatagtttacatagtccatttctggggtcatgtcatcaatgttaatatatttgcagttgacgcgtttcagaatttcaaattctttattatcaacctgtaccatgtataattcagtagtttctggaatcagttcccacacaatcagtacatttttcatagttcacctcacttaacaaagattttctttaatgctttcaggatcgttgcttccggtgcttcttccggtggaggaagcaattctaccacttcctcttccaactcgatatagtctaccagatattctacatagaatgcaagtgcttccatgaaattagatgctacatccgattcaccacaagcgcctacatgcattgtataaacatcactgcgatcaagtttgtggatgcttcccagatagttccggttataccagacttcccacactttcagctttccggttttggttgatgttttataatcggtttcgtaatgatgcaattgacgttgcaaatcattgataataacacatttttcgtaattgttttgaatttccatgatgtaatcctcacttatcgttaagaagttctaaaactttctgtcgtactttgtcaatattagttgattcaaaaactgtacggtatccccagctttgaccgtatgagcggttgcaatctccatatccccattgttcaacctgatagtattcaaggaatggatgctgccgaactatgataccatcgcgattaaaaattaccataatataatcctcacgtcaacaacttattttcggttgtggtcacgatatgttttaaaatatccctcgtaccacggtaaaacatctggatttttaccactatacagacctttaaccatcatgtcaataagaccgtccggtgtttgataattaccagcttttataagctctctgattaaaatttccctgtatatgtctttcggatcttcgtaatcaacttgtatcgttgttgtggtctcattcaatttggtttctggagtatcttgcatcgccttccaccaatcttttgtgatcttcatgttattgaattgcataatttaacctcttacttgcaaacgtattgatctacatcaattgcgccaccgaatgtaggatgacgtttttcaaatcgaatagttccgtcgtttggttcgaaaacggagtattcatatagatctttcttaccaacattcttataaaacccgcctttagtcataacggtttcttgtacgtttgctttgtgtacgttgtattcatcaatgtatacaaaatcaaccatcttcccatttttaatggttactttaagatcccctggctggtttccatattttgcatacagtggagcctctttaattttggtggaaattccatctttcatactccactcataacgaacggtgcattgataggtaaaagtttcgtccttcggttcttccaccactttttcttcctgtttcggttgttcttcgtcaacctttgcagaagtctctgaatcgctttctgacgcggtttcttctttaggtaatacattcatcaagttttggatttgagcgttgtatacagcctccagtggctgaatctgcccgatattgatcattgtatcacgaacagttttattccagttacgttgttcttgtttcagagatggatcaatcttaacagccttaacatatacttcatgaagtttcgaatccagtgcggaaattgactcattagcacaaataaacttctctgatttggtagtggctttagcgcaatcgaaggacgcagcattagcaccgaatgcagtagcagaaagaacgatagcagcgataatgtttttcataatatattcctcagtgttttgtcttgatgggagtatattactactcccttaatccggtgtcaactactttttaaatttcttctacagtaaagtcttcaatgttgttgtgctcggagaacgttgccaaaccagcatcccatgcatcatcctcagagaagaatacaccgtaacgttcatatcccttagcgccttcaaatttaaccattaatttgtgagtatgtttcattttgattctccttcgttgtcttgatgagtttagtataggggatcgccgatcccctgtcaaccagtttttagaaattattttcgccattcaccggaaacaatgaagtttgtaaagtgattgtggtccgtgataatgtcattaagtaccatatgcggatatgctttagtgtaatcacgtttacgatcagtcatccaaccaacgaaagtcggtgcaaagtacggcacaccgtcagatgatgccatattaaaccctttatcagccataaatgcagccgccctaagatttttaattgaagtagtgcgactaatttcaaaaactttatcagtaaaattcattttaagccccccgctcgtgcattaatacgcattttctgaatagccatgatctggcttactgcttcttctttacgttcttgcgtgataacgtgaccagattccgcaaactctccagcaacttcttctacgatctcgcgaacttgagaacgtccaaagatgcggtttccttcgtagctcataaactctgttactacttgctcgatagatttcatgtgattctccttttgtttggtatgggagtatgttactactcccttatctttacgtcaactagtttttagaaatttttcgcttcttcttcggtcatcatcaccgcgcattcgtgcataactttgaaaaccgggtcaatcatatcgaatgcttcgcgagacaatttacgagaagcgattttgattgcttcaacgtcttctactacaggaacaaaaacagttttcagttcatcgagaacggcagcttctttttcattcaggaagattccagcgtcgtacaatgcaacttcgataacattaactttaaccatttttatttcctccagttcgtttcggtatgggagtataatactaccgatgacctttggcgtcaactagttttttgttattttcgtgaaattttttcgtcgcctcatgtgcttttcgctgggcttctagttgtgctttctggcgtgctgcctcttgtgaagccataacggaagcatttgcagcagttacagccgcgaccatcgctgcggtattagcatttaccgtacatgcactagccagcaaagcaatcgcaatcattttcttcatagtttcccctttaggttatcttcgaccttcacccattccgcgtattcttgcgcggctactttcggatttagtccgtcttcgtacattgcttcaagtaattcttcgtcggtgggcttataccctagataagcctccacctgatttttccaaattttataccagttcatattatcaccaatcaagagcgcgtgtctctgcgtcttcccatgcttgatccataacagccttgaaaacatattctagagtatcatctttagagaatccgaagactttagacggaatatcttcaattgctactcccgcaacttctgcattacgcgcttggcaataatgcaactctaagttatcgagatagcgaccgcctaatttctccatatcatcccaacatttccagtaacctactttatctgcaattgccaacactttgctgttttcgttgttcatctttgattctccttttgtttggtatgggtgtattatgcaatgctggattatggaagtcaaacaacttttcaaataaaaaaaagccgaccacaaggatcggcttaatagtcagttacttactaaatttctttttggcttcgtctactgcatgagatgctagtaccgctgccgcatgtgcacttttatctgtgttgcagagaacacccagataaacatcacgccaaagtttaatcatctcgtagatcatatcaatatcattttcttgtttgttggcgatgctattcatcgttatctggtaaggcaacggcttgatctgtactggttccgccatcgggctaatcggtttcggatcagtcataataggtgctgttgttggtggtgttttccatacaccattattccacggtttaatcgttgtatcgtaaagtttataaggatttttgtctggattaaccatccaggcatgatgaagtacccaaaccatttgaagtaatgcgtcgttcagtcatactttccctccaaaaattctttcatcaaatagtctatcgttgctctgtgttctggtgtgtttgttatctctgctaacttgttcagagattcaatagtgatccggttggcttcttccatagtctcaacgaccatcggtacaatctttttattgttgtacacgaaagccacataaccgccttctggatattctttcataatcaacccttcttaagttctttaagatctttcttatattccttcattgcggtcgtctttgtccaatactcatattcactatgatgtttatcggcatctttgaccagtcgatcatactcttcttgagtaacgctatacaatggcatagaaacgagcttatcggcatatgggcgaagtttttcatgttcattgatggattgcattacctcggcctttttcttgccctgtagctcgatttcgcccttaattacgcggtcgataaattcggctttagccattgcataattgtatgcttccagcgtttccgcttgcatcaattcaatgcgtttatcgacatagcctaatcggatttcgacgaatcgacggatcagatcgctcgctttctcgaatacttctactaaaccacgttcgttaactactacgatattctgggctactaactgcgttagtttaaaatccttcatgatttgctcatgtcgagcggattcatcttcgcttttgaaataatcgcgtttcagtgttacctcaaatctgaatccgtccttagagcaacggtcattatacgatacaatcagatctttttcttccagtgcatccagtaccgctacatattcttcacggtcgaacttataaggaacttctgatattgtcagtttagtcttgccgtttagttcatatgtaccctcaagaatcacaccatcgcgatcatctcgcgggataactttacccgtgaatttcgggaattgaacactaggttctttatccagttttccggcaagtgctagctctgtgcattcaataaggctttccaatgaatgcggtaaaatgtcagttttataccctgtagcaataccactaataccattagccaataccattggcacaactggcaagtagaacgctggcgggatgtgttccagatcttcgtgcttaggtgcgcaattcatatctttatagattttaaagaagttttcatgcacacgagcaaagatataacgtgccgcacctgctttctggactaaacgcgatccgaagttaccttgaccgtcaagcagtggagtattattgctccatgtattcgccataagtgatccggcttctacggcattagtttccccgtggtgataacccaactcagcaacaccagatccaatatctgccatcttacggaatttcttacggtcgcctttactcttttgaagtgcgcactccataacaaagcgttgtactggtttaagcccatctaccaattgaggaatcccgcgttcctcggcagaatagatcgcatattccttagcttcattatgtacaatgctttcaaggctgcggtaagtaactgatttattcatcttcacctcatacacgcttacaaatcacattctttactttatcagatttatccgcccaatccaatagccattttaacggaaggattgaaacaataaacggggcagcaatcaaagcaaacatgatacaccggataatcagaaaaacgcaagtaacaaaactagcgatagtgatcccgacaaaacaaaataccatagaaaacagagtaatgatatagaaaggccagaatacccactcccgcatcttaacgcctttgtattccctgaattgcttaaaatctacaaacaattctcggatagacgcgtacaggaccgaaaaatcatctttcattgctctgaatgagcaatcttctattttagaatgatctagcattattaaccgcctttaaccattgataccggaattgttttctgatttgtgtataagtggcctacttcaaatttttcctgaatcaccacaacgttacaatatccactgtctttaagttttctgataatgtctcgcttttgttcgtcggtgataggattgactgttctcaccaattcatcgcaaataatagcaccatctttacaattaccagtaactttcatgctacgaccgtgaacaacaaccacatcaccgtaaatcacatttttgtcttcgtatttggtaataatcgtgaccgtcataatgtattccctctaagaaaggccgcgcaaagcggcctatgttgattattgttctacagtataaccgttgttttcaagccatgcaataacaatcttttcaccaatttcatcgagcatttcatcagcgccatattctttaatgaaagtcgatggatcattattgcttactacgtgctggatcacaacatgttcagggattgcatctagcagttcgctatgatcatactcattaacgatatcttcaacggtaacattattagccagatccacatcgtctaaagtcaccgtaacgcgtcgagatggatatgctacctgttctacttcaacatgtgcactttcgcaagtaaccttcatatcaatcataattaattcctctattagtaatggctaaaaccttcggttacatcttcaaccacatagtaacgatgacagcgcattttggcattcgcataatctttcgggatacttacaacgtgacgcggatcaactttgcatttaatgattcggcctcgcccaccgccatagtgcggaatatagtgtttcgctgcaacgtggaggccattagagcaagtacgatcatcatctgggtccacgtctttacgcttcattttaaccgttcgccctgggctattatcaaacgtatgcgtaaagaaatctttataatcaacatcaacacgtttccatgcatagaaacaaccgtcttccccgatctcaatgtcgttgtgctctaagaagtcaaacagacgatctacggccttacggctagggtttttcttgcacttctcaaagaagttcagatagtgcgtatatggcttattctctttaatagactccacaactcgacgagtcagattattatcaagaacaatattatgataatacacaataccattttcgatacggaaagcgccgtgataatatacttcaaccgctttcttaatgtcaatcagcgtaattgctttaatgaaatcattctgcttaactgcttccagtgcttcattaaagttaacatgtgatggatcagcagtataaacaatgtcaccacatgtaatagtaataaacttagttgaggctatggctacgatttttgaggaagtagtcacgggcttttttgcgcgttcaccgccttttcctttactggttttacggcgtgctttacgtttttctagtgccttgcgaccttccgctactgcgtctttctgaatcagtaatacacgggaggcagtacgacgagataccccaaatgctgccgcaagtgcttcgcgggtagtaaacttaccttcgccccactgtttagccagtttgatttgtttttcagaatccaggcattgaacgttacggtcagagacggtgatttttgctttagtcatagtattcattcctctattagttgggcgactatcgccgcccgattcacatcattataccagaattattttgcttcgacaaccttgcggattgtgcggtctgatacattatagattcgtgccagttcgcctttagtcaagccgcgagcgtattgtttacggatggtttctttctggatagcggtcagtttagtcataatatcacctcttaaaatttaacattcttaaccagtttcataaagtcttgtgcgcgtttgtcgttatgcagaatacgataccagttatctacaatatcatacagtaacgggctattctctttaaacttcgcacaaactgctttaattcgttcgtttgctgccgtgaatttttcatcacaaatctttttagtttcttcgtccataatccaacgagtatgaaggagtaacttggaaacctctttattataatgacgaccgtacagtctgtcaataaattctggaacacagcgttctagttcatcgtcatgaaacaacatagtgatcacacccagatattcgccataccccagatgattggtcttaaccttcttagccagaccagccagcttaccgcaaacaaattctagcgcacattccaattgttcgtcaacgagatatttttgtgtctcgtttcgagtaataatatactttgttaccccgaagtagtcaagcgccgtgtgtaatgtattttcactatggatcgatttacgactacggctttcgaatgcatcacctacgcggaacatgtgcaagcctgataactcgcgaatctctgccgctttcatgtgatggctggttttatgccaattgtcaccaatcttttccataatatacacgttaggcagcttgggagtagcttcacgttgtgtacgctcggtcttttccggtttaactgctttagcacgcagatcatcggcctcagacaccttaatcacggtcatttcagaatcatcataatactgtttgatgtactcgaaagtctccatatgtttttcgttgcgctgacggaacacaagtacctttttattgatgccgtattcctggaccataccgttaagagtcagtgcacgcagtttcggtttatcggtatcatcaataagacacgtaatatcttctttatgcatccatacaaaatgcgtaatgttgtattgactgctaacgaaagcagggcgcaatttgctgatcgtgtgtcgatgatgatacagagtatacacttgaccttctacgtcattaggcgaatctttacccgcattcacaaacttattatagattgctaccggatcgtcccattgtccgatcttacccatcttgctaataatattgcgttgagtcgatgaatactcgctcataaattgcgcaagtttacgctctgttttaatgttggcgatcttttctttaaccttttccaacatcatttcattgatttctgcaatgcgtttttcgatgttcgctttagtctcaattgacaagtgaacttcttcacgcgatggcatcaggtccagatcacccaactcaaaattaatgtaaatggtctggtgctggcggtttacagcttctaaccatgttccgcgaacatattcatacgggatcggatactggatcttacccatgattgcatatactacataggaatcgttatcacgcccattacaaacataataattatcaaagctagggaaataattaatttcgattgcattgatattaggtttgtgttccccaaaatgacgaagtacaaattgtgcttctcgatgccatgtttgaatgtctttttctttcaccggaatagtgattttcagaccattgtcttcataggtcggttcgtcgaaaatctgcaccattttcggcatagagttttgcacaaatgcagtaaagccataagcgcgaccattgtagtagtttacgattgtaaaggtgtcggtatagctataagcagacttcgcacccaaaccaaaagacccgatatagtcattagtctggtcttttgttgattcaaagtaaaccgtaaacagttgttctaattctttcttagacggaataccagtaccataatcacgcacagaaaaatacggttcgattgcagtcggtaaatgaatatcaaacggacgatctaaggttccggcttctttgtgagtgtcggtagcattgcacgaatactcacggacgcaagcgcgttcacaatattgataagtgttcttagaaagcaccataaaagccttgctacttgctttcagtgaaaaatcaaccgcaccgctcaagtcactgccaaatacttcttcattatcaatatgcattttcataatataatcctcacttaattaaaatcttctttgtccatctctgcgtaaattacatcccacgcccataaatcaataaacgcattatatgtcacggtgcaatcgttgtcaatcacttctttcgcatatttcttgatgttttcgtaggaaacttgcggatcaattttgtgtttacgaagatgcgcatattcatacctcaaacactccataaacaggtccatcgatttcttttctcgatgacacttggcgatcataaaatcaaaacttcgactcattttctactccttatacattttcaatcacccattgcagatgggcttctgcgtcaaccagttcagcgcggcttttctctaagcacttgctgtattctttacgttcccactcggcaatttcgtttttcaggacttcttcatagtaagcaattacgcctttcagatcggaaactttacggcttgccagttcgatgtaatggttacgcattttgattctcctttgttactagataacgaatttggtcttgcattgcaatcagttcccagcgtgctactttcatcatagaaaccgactctttgaacataatattagctttttccttatcccctgtcaagtagatttctgcaattttttcacaaaatttttgagtttcttcattcttaaacggtttcatataagtcaaccttttgttttcgatggggatattatgatatatccccgatccggtgtcaacagatttttaatcttttttcagtgcatccattactcgctctgcgatcagttctcttaagcactgataaccatgatatttgatggcaatgtcacgcagatcattaaccagttcccgtacttcatggtctttcagatcgtctctgtatttcgatttaatcgtatctttaggtggattgcggataacctgaaaaccttgttctgcaatcactgcggcttctcgctggcgttcatgctgtactgtatttttgatcaggtctgcttccatgaactttgccacactcatcatcatgttattctttttgctcatcgttaaatcctcataaaagaaaagggagactcccattatagagaatctcccttgtatgtcaagtgttatgattgcatccaaattttgcgttgatctgcatcttcactatagagcaaatcgaatagctctttatagttttccggtaacgtgatgatctccattacaggatcgttgatcacgcgatgataatctgattctgtaagcgatgctaaccctttgatatatcgaatgttgtaacctttgatattatctcggtcgttctcgaaatcttctaggtcataataccatcgaacatcatcacctttctttggttccgcaatgataataggtgttttgataaaccggattcgaccatcttcgaacaattcaggccaacgagcaaagaaagagatcagactaggcttaatagacccgatcccgtcggtatcagcgtctgtcataatcgcaatatttttgtattgcataacttccaatgcatcaacaccaaattgcaaaccagtgatcgccatgatgttaaaaatttcagcgttcttaacgatctttgcctccggttgttcccacgttgtaagagttttgcctcgcaacgggaaaccgccatgtaaatcttgatcacgtacagagatcagatagttgatcgcggaatcaccttccgtcaaaaacagggtagtttctgcgtcagttccaataaggttagctttaacgtgctttgctaccttagcccgttttgctgcctttgctgccttagtcgctgccgctttatctgctgcctctttgcgtgccaggactacagcaataataggcatgataatgttttctttcttcgcaatgactttagccagctttttaaaatcaagatcaatatgacgcttgatatcaccagtcgggttagtcaagcgttcttttgtctgtgaatcaaaacgaaggttaggcaattcacgaacaataagaatacaggtcaatccagatttaaccgcagctttagtaacatcaaccttatattcttttttgattcgttttacaatctcttcacaaagatcatctgtcacataatcaacgtgtgttcccccgtttttggtaaacagaccgttagcaaaggatactgatttaaaaccttctccctcgaccgccggaacgagggcaagtgaaaagtttttatcttcaatgacaaacggatcatcattgtatagtttggcataatccttgaacttgctggttatctttttgccattaaacttaaacgtgatcttaggaaagattacactcaatgaatacattcgatcgcaaatcacatctgaaatttcttgtgacatgatcataccttcaaaatgatcgaaatcggggcagaacgtaaccttagttcctttcagttttgacggcttagatgaccagctaatattttctgcaccattggtacattgaacggtcagttcattctctccgtcacacgtcacaccagtaaaccaggacgagaaaaatgatgtgagcgcgcttccgatcccattcatacccatagtaacacgatttgtatcatcaaagttagaccctgctttagctcgtgtccatgcagcaactggttgtggaatctgtttcccctctggcgtcgtaacaatatgttgcggaataccgcgaccattatctgttactgacacaatgttatcttttatatccacactaataacattagcgtactcaaaattagtgcggatcgcctcgtctaccgagttgtcgatgatctcatcaatgattttaaccagtccaggaacgtatgaaactttggtccattttccaaataggaaacgattgtgtgattcataagtcgttgacccgatgtacattgaaggtctcttaagacagtgagcgcgatcatctaacagcaaaaattcagacatattatatcattctccgtcagttcgtttcaggtattccaatgccgcatataatctttgaggatcgtctttgaacatccctaatccggcattacattttccacaaagaacacctcttatcttaccagtcttatgattatggtcaagatgtttccacttttggcgttttctctcgccgcatcgttcatttatgaattttacaccgcatatctcgcaattgtcaactctgcctaaaatttctaacgcttctctttttgatatttttataccattttcggcatgatgatatggcctatctagttctcgctctcgcttctcaaacaatcgacactcatcagaacaatacttttgagatgcgtttattgcaacaaatggtttaccacatttagcgcattctcgttcaatctttatgttttgtgcctggtccaacgatgcgcaacgagaacagcaaaatttatgatagcctctagagtatgtatgataatttacaggatttgggcatcttgcacacttaactattcctgttattccgtggcgcaatctataaacagcctcgttatatggttgttgatttctgagacctccattacagaacttaaactcattccttataatctgaaattccgcaggatacaatttttccatttctggaattttattttctttaaaaagatttgagtttagtctatttccgcttttcgcctccagaacatcaacaataaactttttgatgttcacttttctctctccaatacataacataaccataacttactgcaaccgccacaaagacggctgcaacaatcatattaaaaattgagtgattgtcaagtatatgactcatgacacgcgcacatttttatcatagtacccgccattaatcccgcgcggggcagttaatccctgtttgcattctttaccacattcagggcattctgccttttcacgctcggaaattttgcggattttctgaaattgaccgtgttcttcacaagaataatcgtataatggcatattatcccctttgtttcttaactgaatttggatctggattttctggtaggtcttccagacccatagcataacgttgtgcatagattagcataagaatatcgcgagcgcaatcatgaattgcatcatgtgcgataaaaccatctagcgtacccattggtaacggacactcacacatcccgcgatgcatcaatgtacgctcaatggcggtgcgaacatctcggatattccagaatcgcacaggttcaaggctgaacgtctctcgtgtattgtgtgcacggcggatcatatcaactagtaacggaatatcaaacgcattaccgcgtgaccacaatacggatttaaccggatctactcctacggcttcacagaatgcgttaaaacgcgctaaaccttctttagttgatacttccgtaccatttgtgattaattgctttctcatgccttctgaggcggtattcttccaccattcaaccacaccatgatcaaacacccttacacctttctgggaaggaatatcaaattttaccagaaaggaattgtccaccagttctttaaatgtaggtggattgtgcggatcttctttaaatccgattgccgccatattgatcaccgccccatcaggcggataacctaaactttcaaagtcaatcattaaatccactggaagcattttaaatatcctccgcgatatgccggaacaactccagatcgtttttatccagaatgaaaccgctacaatcaataatcccgttaccgtaattatcggttaacagtcggtccgttgccatgtatgcgcgtactttgttgttaaaattcattacatgttgtgcatagtcacaatgaatcttttgacggttccacgcgacaattgattgtagatgtattacattagccatattattaataacaaccatatcaaaaccctcgcttagtggaatgttctggcattttattgatacatacagcttggtagtcacgagatttttttgacgaattaagagctacagccaaaaaatcctgtaactgttcgtttgtcatttttggcttacaccgcgtatctaaacccttcgttcttctagcttcattagccatatcaaaaacctcgcttagtgaaatgctcgatcattttattgatacatgcagcttcactatcgccggacacgttccagccgtatagaccccatctaaagcacatggtaacagttccattgtgacggcttaccgtcacatcattaaattctgggatacttcgcataatcataataatttcctcaaatatagtctactcgataccgcgcacgggtaacacccacatataataactgcattgccaattcaaagtcaacattgtctgtacacatgcaaggagtatacaggaacacgcggtctacgctgatcccttgtgacttatgaatggtgcaagctggtaatgcttttacattcaagaacatacgcttcatcgtccagaaggaatcccaatctggtttaaattttggattctctttcttcatttcgcgatattgtccggcgaccgtattcagatagatagagaaaatgttcttctgacgttgttctgtcagaatgttgatttctactaaatctggtttatctgtagtgattccgactgcatctaaaccgactttctgatttaggatttctttgtcttcgtcatcatcgacgctttccactttcagagtatagcctaaaactggttgcggatctacccccgtgcaacgtaatgtaaattcgcgcgggatgacctctttaactcggatcatctcaccattgttaaaaataacattgggaatcttcttcccgcgttcatctcgcagatattcgatcaatggttcctgagtaaccagaatttcatctacaatcactggttcatcggtgttataaacgcgcttacgcacaatttcattgagtttttcgacgctcttgttagtgtaggccagaatacggttttctagcaggtcttccggcgttttaacggtttcgaaataatgcttcataaactccggcagagttgagctatggaatacaccctcgttgccgcactgcttttcgaatacccatttaccattacggacagcggtcgccacatcaatgatcggtgcattagatcgtttaatttctgtcaactccacgttttgaaaattttcatccgtgaagaaaggagagatcgacgttgcaccgctcggatcaactggtcgtaactggtgcggatcgccaactgcaataacaacaattcgaccgttgatactcttcatgagaatatcaaatagtttcttatcgaccatactcgcttcatcaacaatgatgatctgaacatcatctagcttaggagtatctttttgttcaaatacttgagtatcttcatagttggttggatttagtcgcagtagtgcatgtaaagtaaatgcttgacgacctaccgccttactcaaaacttttttagcctggtgggtaggcgttgccaaaaccacaccagttacaccacggcggaccatttcctgaacaatgaatttcatcattgcggttttaccagtacccgccgcaccacggacagttgtatgcttcttttgttcaatacgtttcattagaacatcaaaagcatgtttttgcccgtctgttaacatatcgaaagttaatactctgctcattatcctaaaatcctcaccttgcgaacacagatagtattgagttctcgccgtacccgttctttttcatattcaggaattttatattcgataccatcccgaacaatttcagaagaccggattatgccaaattttcgtttaggtacaaccttgtatttcggttcacccgccaatagactctcacaataatctatctgatcacacattgacgctaacgcagcatcatgtgtttcgcaagttaggacgcgacccttcgcgtccactgagtattgaaagaatccgtctttatcacgataacatacagcaaatacatgcattataaacctaccttcgctttcatcaattcgatccacgacgcatcaatcggaagcccgtatttcacgcgttctttttgtgctggcgttaagttctcatacttagaaagagattcaatcaaaacgctggtatattttagcacgatttcggtattgtttgcaatagccttaagtttttcttctttcttgttgatttcgctaagggcttgcttgagatctgcaattttctgataacgttcttccatacgtaagagagtatttttaatcgctcgctcggctgcctctgctttctccggttcgttgtgctttttgtggcgctctattgctaatttcttttcttcgattgccatttcctgatttttgatgcgattctcgttaagttcgatccactcgatgtacttcgcacgtagggcaatttcatcatcagaaagtttaccgttagttcctagttcctggatctctttaagagattcgatagtgtgattgccacggaaagaattgtatttcagtttaaccggaattacattgccatcaacatatcccagattgcaatcaatgcgctctaaggagagtccgtcatcaccttcaccgaaagcctcacctgaataggcacaatgagtctggcggtaaatgttacgcacagtgactaagctcatagagaagtctttgttgcgacgtgaagcaccagccatgatagagttcagccggaaaacaaccagcgccaattcttcgttagatttaaaagcaaacagtttcataattgattctccttagttggtatgtgtgtattattgtctatctggtttgtgctgtcaacacttaaattaaagaaaatttgtaaatctctatcagatcgccattacacgcgtaaacttcctcgatctcatcaaggatcatggtcgtccctgtcttgtatatgcactcgcgctcatctgccaacatagcatacaaagacagtcgagtagtcggattgtcatactctttagacaccactcggtcaatagcatgttcgtaataattcatgcaaggcttggtaggttttattgcaataatctttcctgttgcataaacatcggttgcaaagtcctctgctgttgattgcagtggcgtaaagctcataggacgctctacaacgaaagaatcgcctacaattaaggtatccagcttacggccttctcttttgctcacaccgcgatacaaggcttcatgatgcactaaccgctcagtcttttcaatcaatccattaaggatcgacatatcgatattttctttagagttcatcacctcatcaatgatgttaagttcttctggtgtaaattgcataataaaaaagcctccaatctttcgacgggaggcataataaaaccattatagagtagtgtcaactaatttttagtagccgcgttcttgacgggcgaagttttcagcatttttcagatagtacagaataaagagttcttgagcgtcaatacccagcgggatcatctttgacagaatgaagtggatcgcgtccacaaattcaaatttcacttcaagctgatcttccggtgacagttcagagaatttacgcgctcgcgcttccccgtggttctttttccacattttccagattgcacttgcatctttaccattggacattccacccagcgatgtgtaaagctctcgtgtttcgtctgcgatagcgtcatccatccgttgcatccaatccagcatttcaccgcaagtctctagcttagttggatttgggacccaatcaaatttttcggataatgcaacctgcaaaccagtttgcatttcgagcatcacctgaaacggatctttaccttctgcaatcgcgtgatgatatgcggcgatagccgcgttaatatctttttcgttaaccagaccagcacaagaattaaattctgacatattcacctcattaattaaaatttacaatatttcataaaccgcattttagccatcagaccttgtacggtgttctctttgatatattccatgatctggtcgcgtgtagcgccctcgtcctgaatcatggcgttaacgtctttagaatgccacgggcagcgatcccacaaaacaatcttttcccctgcattgataaacttttccagtcggtgcattgtatcggcagaccgtggttccgcatcaagtacaaacactcgctgatcagggaaaggaatttcatctaatcccaaagtaccgccagtaattgcacacccgttatcaataaacaatgaatcgatcggaccttctaagaaatacacaggtttactcggatcggcgcgttcaagaccatagaccttactcgctaactcatgagttttaatcgtcatatatttggtctttccgtaatcctttctcaatgctcgcccctgaatggattctatcttgttctcgcggttaaagataggaatcactaaacgcggttcaggttgtggattcttgaaagtatcagccttaatgtgatttgctaccttttgccattctctcgtgaaatacagaagatcccatttatcgtgaggaatacagcgatcactgacatactttattataggatgattagccggaagagtatctaatctctcgcagaaaggcaatgtttgcactttcttaatctccggcttttctacctttttcagtggcttgaacgtggtgttcttgtggtcgccttgttccttccgtctctccataagccattccctgaataggtccggcttatactgtttgagaaattcacctaacggctgattgtagttacagttgaaacaaccacaacgcaaactatctttataggtatagatacggaatcgcgcttgagtatgatttttctttgagtcaccgcagatcggacaactacagaccagcgtaaatgagctagtatgcaaccgtttaaaatttcgttcgccgtatatggctttttccgctatttcataatctgcgtagtaaatcataataacctcttatagctcaaatttcatgaaagttcctacactttcattttcattctctccgttttcatctaagccaaatttgtagacactaccatctggcgatgtgtaagagaatacacgaaaacggcctaccgaatcaagttctgtaaattcatattcttttccggcttcaaaaagtgcatatgtgcttttaagacatttcatcgtaatcatttaagcgccaccgacaacagaatgagaactacaccaacatacattgtgatctcggataacttttctgtttttgttttgtgtccagataatccgaaaacaacaacaccgataatagcggacagcaagccaacgataaacatgatgatactaagcaccgtctttctcctttttgcgtttttctttacccgctacactaggtccacgattggtaatagatccgctcgtttcacctgctgcgatcttctcaggattgccgccagcatcgccagcggtcatatcttctttgagtttattttcttcaacaaactgtttaaagccaatcatagaataatctctttcagtaagtcaacaatctggtctttcgtcagtttatcctgattctctacaatcttgataacacaagcgttaacatcttttcgagtaacgcgggagatcgttttaatacgatgaaacggttcgtagaaatatactgcttcattatagagcgcagcaatttttcgacgcatttgatctttatccgacaagaaaacaagtgctgttttatgaccttctacacccgccacgttatatagttcagcaacaccccagcgaccttccggttcaatcattccggcgtgtttaccgtcgataaaaataagaatatctccgttgaatgcggttttgaatgctacatcttccggcgtaatcatatttttcataatatagtctccttagagtttcattatagatcaatcgaatgtagaaagcaaatgttttgtttctttcagttgtcgttcaagatctttgcgtttctctttaagttgcattttagcattatttcgctgtttttcaacatctttatcaatgctcttattccagttatcaatatcagaataagttggcatacccaattctagacctaatgcggttggatacagggtaacagtccataaaccgctaatcttcttaaataggtcggggtgtagtgtactatctacatcttccggtgtcaactctttttcttctttcagtggtgggatctcgtcatatggttccagtgcatttactttaatatcagatacctcatcaaagaatccgcgtacatccgcaggaaatacacaagcaatttcccaaccgtgatcacgcagagaagtaatatttttcactcccccaccatgtgtgatgattgatgtgacattgccatcaaggtccaccgaatttacgagaaatggcttatcgtctgtcagatcattataaaactgtgcttcggctgtagtcatctccagaaacagatctcggatcggacgaccatcaggtgcgttaccttccttgagagtataaaagcgacttacgatccattttggcggtaaagcattagcgatcatgttatatctcctatcaaatcattcaccagcgccccgcagggcgcattttattagaaagtcatgttatttgctagctcgtcgagtttttctcgtttctcggcttgctgtgcgctttgtggtttaacttgtgcattctcctgatctgcgatctggtttggtacttcataccaacgctgattgcctttcttcacaccaacgttaaaccgtgaataatagttcttgtcaccgtaacgagacttgatctgcttcatgagttggacgcccattttagccaggtcttcggtttcgataacacccaacataaagtcggcagtagccggaagacctgctgattcagcggtatcactcatgttaaggtcggaagcatcccaacccgcgcgggtagtctgtgccgcagtccaaccaacaacatcccacttaacaaaaaatcctcgcagttcttccgcaatcgccttaactagtgtgtaactattttcagagtatacacgcaagcgagacgatgcgcaaatcccaagatagtcaacaatcacaacatcaggtttaaactgtttcttgagtcgcaattcattcattaacgcctcaaagtgattggagtttgcgccaccagtcggatactgcttgatcatcaattttccaaccggacgatctccgatcttcttattcttaacacgcttcatgcgtgcggaatattccgcaaaagaaacattaccattatccaattcatctaatgtaatgtcaagcaagtttgcgtcgatacgttttgctactacatgctctgccatctccattgagatatacaatacatcataaccacattccatataatccgcagcaagagaacacaagccaagcgatttaccaacgtttacaccagcaagcaacacatttagcgtttttctttccgcccctcctttcgtgattttattcaacatcggcagcttaaacgggatcttattcgccttagtctgatatagcaagaatcgtttttcaaagtcattaaaccagtcatgacctacatcagaatcaaacgtaatggatagtgcttcctgcatgatctcaggaatagcaccctcactcggcaatttcttattctgtttctcttttggtagttgtgcgttcgcctgaatctctagcgcccgtgacattgcattgtacatagcacggtcacgaataaatttttcggtttccttcattaaccaatcaaggtcttccggtgtattctccagcgaatcgagaagatttttagccccttcatatgttgtctgattgcctctctccttgtctaaagcaatctgtaatgcagttggcgtaggaatattggaatattcgtctacgtgctttttaatcagcttataaatcagtttttcttcgtcttcggtgaagtagtccgctttaaggtgaggccatacattcgtaaagaatgcgccattgtaaatcaactgtgaaaagatagttttaatcatacatagctcccaactacacgcataacaaaggtcttgagtttataccagaaagtttcttttttcaacttttcttctgcttctttgatctgcgcggttaacgccttaatgacgtgtggatataccacatcacgatctgacggcgtggagtagtcgaccacaatacctttagtgtctggatcgtattcaacattatgaatatagacaatatgatgttctccctcttcatcaacaattatcagttcctggataactgtcttcattgcttcttgaatcaagctgtgtgcttcttctaaacttgttggtttcttatccataatataatcctctctagatatgaaaaaggggcacgtagcccctttactaccattgttatgctaacatatcttcgatttctttgtcaactgcttcgtcgctgatcacttgccccagcttataatgatcgttgattgcttcgttaaacttatcgtttgtcagaagtggtttccagaactcaatgctattggtttctttagcacggaacttgcgttcttcggtttccatctctccggtctcggtatttaggattgaacgagaataccagccgtttgacggtttcactacccagcctaactctacagccaattccagcaagccggaataaggatcgatgccaccgctaaatgttacgctaatcgggaacttagatttttctttaacggttcgtgatttttccgcattcaggataaaatcataaccagtaatttcggttccttctttctgctgacgacgaccaataatgaaaacttcattggctgaatacatcgcgccagtaccgccggacataacggtcttactaaacatttcttgcgtttcgtaagtgtggttaatagcgatgcacgggatatcattcatagtcagatacggcgtaaccatacggaacaagcctttaagtgctttcgctcgcgtcatatcctgtgcggatttctcattaatcgcgtcttcaacttcttttttacttgctaagttaccgattgagtcaataaagatgatcactttatcttcacgggtaatttgctcaagctggttcatgatttcaaatttaagttcttcgatgttcttgattggaacatgcaccacgcgatcaggatctacgcccatagattccagataagcggatgtaataccgaactcagaatcaaagaacaaacacgccgcatcaggattctgtttcatgtatgcactaacacaggttaatcccatgtttgatttaaagtgcttagacggaccagcaaagaaaatcagaccagattgaaagccttttttaagatcacctgaaaacgcaatattcagcatcgggatcttagtgcgagtatttgttttttcgttaaagaagctggatttagacagtaccgcagtagttttcagggtagagttctttttcagtttttccagtacagacattattaatacctctattcagttaatccgtaatactttaattgcttcattgttattcgatctttgtagtgctcttgaattaactttttcatcgcaccaacatcgatcgtcacaaatacttcgttgctgtgatttccgtgaactttcttgaaatgctctatgccttcctcacgtccacgtttaatcttttcaatgtatctcataatatatttctcacattgacgggtatcgtcacccaacacccgccattatacacactttatcttaaatgtcaaacaggtcagtcagagaagcaactttttcatattgcagctttgcagccgtggtaatgttctccagtggtttgacgaaagtcttattaaacaacaaaggccagtccaaccacttcaacacctctgattcaatttctggcggaatacgagtaccggacaaccaaccaaaacagatttctccaaacggatttcgatctttaagcggtacaatcataaccttctcgccttcacgaatcggatctagtccgaattttcgagcattacgattataacacaatacactcttaaccgcatacggacaacccttaatcggatacccgtttgaatcgctgtatttctgtaggttgtttgcagatgataccgcagcaacctcaagatagtcaagttttctaaactcttgctcaaaaataccgtagtattcctgcaatgactcttcaccttcctgcaacatacggcgaatacattctttcagtgatttctgacatgctttaggggtggagctacgttgcgtttccaagcccatgatttttagcttaggctcagcaaagcgcgttccttccatatcccaaacattaagagcataacgctttttgccagtccagaatccaccgatacccgcagatttcaacggaggaccagcaattgcctcacggtccataaacatcaagtgctcatagttgttcatgtactcgcataactcgcgatatcccttgtcgataatcggttccattctatgtttaccgaaattatcaaggaagtcaacaagtttttcggtatcgtcgaaacgatcttccccgccaaccttatcaacaacattgttaaccagcacataaacggagtcagtatcacaataacgaacatatgcaaaatcagttgttccgcaaagctcgtttaagtattcgttaatcttgcgctcaatccactgaattgcaagctgaccgaacaaggtgatcgcactagcgttgcggagatcataaaaacggaatttaggattccccaacgcaccataaagggagttgatcaaaacttttcgagaaagctggtttgtattgcacaagatcgactcgtctttacattcttccagcaatttctctaaggcatctttacttaattcagaaagcatcgatttaaacgcttcatcgaagtcgtgacgtacttcaacgctatagctaatggttcccccataaacatgattttcatcgtgtagaatcgctttacagagttcagcattgcgatcacatgccaacatcatgtttttgtactgcttacgctgatcgaatacctttttaatctcaataggtacgataccgtgaatatcttttctatacatccatccgttaggcgagcaagaatactcatcactcggacgtggtgcagttttattgatatactcgtgcatcggtgcagcatcaaaagatccggcgattgtttccggcgaaatgttaacctgtcgaataatagatggatacagacttgttaggtcaaagctcatcatccaacggtaagcattcggcacaggttcttttacaaatgcgcctggatacgtctgcttaggatgtatcttattttccggtactactttaccctcagctttcagagatccgaagataatagcatcccatactttcatcgggttataaacatggttaaatttaatctttgcatagaaacataggctatacaccagatcgataaatccgcgctttttatcaatcgccagcacacgatcaacgtcgccgatgttataatcgatgtaaagttgatggttgtcatcacgcaatttctttaacggaccatcataatcaaccttaccgattccggtctcatattcagcaacataatctaatgcatatgttggttgagtcgtaaagctaaacttcttgtacaggtcaatataatcaaggctttcgatccccatgatcgtaaatgcttcacgctcgttgccaaaatcatcctgtgagattcgggatttaatcttaccgcacgggcttagacggtttgccgttcgacttccaaacttattcccgatacgtttaatgatatatggaatatcgaatgtttctgtgttccagccagtgaaaccaacgggtcggttttcctcaaagaatcggatgtattctaacagcaattcatcttctgtgtcatagacgttataaacaacgcgctctacaatatcaggtcgaagaatagacttgctagattcccagatttcaccgttttttcctttcaaatcaaatacaaagaaacgatcatgtacggaatcataatgcgtaattgcatcgataggatatttcgcttcttctggtttaggaaattctggggcagtgacctcaatatcaacccatgctacacggattttatttcggtcatatcgaatctcgcctttatatgtatcggacagataggagatgataaaatcatccatccctagtgcctcctgccccatttctcccatctttttacgccatttgttggcctcgttcatagatgggaattttttagcaatgcaaggcttgccgtagatatctttataattcgtaaccataccaggcgcggcatgatgaaataaagttggcatatattcaacgtaacgctcttgttcttgtccagcatcatcaatataacgctcgtagatcttatcacccactcgctcacatgacagaaaatacataatataaactccttcacttacgaaagacactcattataggggaatcgacctagtttgtcaatacccctatcccatcagtatcttatcgcccgatctgatatttctctatcagcgtccactcttctttctgtttgaaagacagtacacggaaattattaacttcggtagtttcaaaatcactatcaatcagggtacacagattccactgcgccagaagttttgcaatgttattacggcgtaattcatcttcccacgtcattttaacactacgaccatctaatttcaacaactccttgaaatgaacgatgtaatagcgccctttcttctggagaatatgacaagactgatacagtgtcttgtcacgattgttggcaatgccgcagcgggttaaagtttccttaattttaaggaagttttcaggactaatcaaattaatttcaatcattttaccacctttctataatctttttaagtcgtttcctttctgtctgattcttagtaacacccgccaaaagttcatcggtcgcatacggtttaatgtgcttcaataacttgtccatatatcccttttcattagccaaatcgagataaaaccgggcgtcatccatatttacacaatatgctttcgccactgccattaaaaccaatttttggtccaattcttctgttagtttagcccatttaccgtatcgtttccccttagaaatactctgtaagagataatcaaaatgcatttgatctgggaggccatgaccgattaaattcatcacatacgcgctatataggcaatctgcgtgctgggaaagagcggtattaatccatctctgattgtatgcagaattattcccaacattcacgcgctgtttatctaaggtgatatgatccatcagagcaaataatgcattgtcggttttctcggtgaatgtatccgctaattcagacaccttttcccaatcacgagagcgccatgcaatttcatgctcgtttaattgtgtatcatcttcaccgaaaaattgacctaacattatacgaactccaattcaaccattaattgcattaacaaaaagacaatgtgaatctctttatcagccgcgtgcgcaaacatctgattattttcaccgataatctcggtcagacgaataatcgacgctggcttaacttgagtatacaactcattataaagtttcttgataaattgagggtatgtattggtatatcgcggtgcaagtttacgcacattagcaaactgtttagttttcagtgcttccaccacatcggttacttcggtattgctactttcgataaccatgctcaatacgccagcatcaattttaccatgtttagcgtagcggtccaaaagtttcattacgcgtcggaagtctgggaagttctgcttaaccaattccgctaatacgcgcatttcttctactggtacaccttctttatcaagaattgctttacaccggacgatcatttctttcatcatgcgaagctgatcatctttagtcggagatccaaacgtgatggggtcaaaacgagatcgtaacgctgggataataccttctagatcgtttgctgtgataatgaatgttacattgtttgagtatgcctcagagaaactacgcaagtgtctttgagcgtcagccaaccccgctcggtcatactcatcgataataacaactttgcctttttctcgtttttcttcatcgagtgatacactctgcgcaaagcgtgtaatctcatcgcggataaaatcaatcttacaatctgcgccgttaacaaacagataatcaacacccacatcttcgcaaagcgccttagcaacggttgttttaccagtacccggcgatgggctatgcaggatcatagaagggattcggccttgcttaacaatctgcgcgaagatctttttatctgcttccggcagaatacattcagaaattgatttcggacggtatttctgttcccactgaaactcattttcattaacactcagcatataatcacctctcacaaattacatcattaaaacggggagtatttacactccccacaaacattatattagtcggtgtagctggagtcaaggtcacacgcgatcatataagatacggtttcacttgccagccatacagccttacggcgagtgaagctcagtttgtaatcgccgaagtcagtagcaaccagtttcatgttatctttacgaataaagaaatggaagtcggcggttccggcatattcgcccatgtcaagacaaaacatctcattaggattatttttgtcaatctcttcccaacctttgatcatcagacgaccatcaatcggaagaaattcaaggcggtccactttaagctgattgctcattttcataagctgtttcagatcgtcgttgctcagttcgtaatctacatcgcttgcaggtggagtaactcggcctttcggtgatacgatagcagcagcactagcaccaggataattaattttcagacgatcattagacacacgaatgtttccggtgcggttatcaaccgtaatatctgcttcatcgcctaccagattcagaatacccaagaaagagttaagatcatagatcccaatttcgtgttccagttcttgattcagagtcgcttcaccatatacaacgtttgtcatgtttttggtgatcaggacgtttccttttttcaggatgatacctgggttaatagcggaaaagtttttcagggtagcaatggtttctttagtcagtttcatcaaatcacctttatcatgttaatcaattaattacgggtttacttcgtgctcattttgaatctttagcattctttcgataaattttttctcggcttccttatcggatgagtgagtatacttcaatccaatgtaagctgtcaagtattgttgcagagcatagacagtaacaggattctttgcggtcttttttccgtcgagatataccagatcaccacgaacatcaaacgcaagtttacgacgaatcacatcatcaacaaatttatctaggacaaaataccactcaatacactctatcccgtgacggtagttcattacatcattatctttgatatagtcaaacggaatatgacataatttactattttgtaggatgaatagcatttgttcttttaagctcatacgtttcattctatcacttcccatcagcaattgcgatcagacgagttactactacgctagcggcttcaatcagcagttcatcagtgtcaatctgataacccttttcgagaatatctttacctcgaatagttttagcgcctttagcaattgaatcatcgtaatacttgcgcattgccgcgatccattctttttgcaccatatcatcaatatgcgcgtacagttcaaagcgtgcttgctgcgggataaccttcattttagctttctcgctttccggcatttgtagtacccacgctttacggatcttgttcattgctcggtcaaattcgagactggttttcttgttctgaatgtctgctacagtaattttagccaggtttgcggaattagtcataatattaatctccaaataaaatcagtatatcacgttctaaagtttgttgcaaccccagcatcagggtaatcaagtttatcaaagttggggaccagcataaactcatgatgacggcaagacaacatttttgttatgtcttcatcgctgtatatgctgtttttcatatcccccatactaactacatattcttcaccggaatatagattgattaaggtatacaattctaactccggctgcgttactctgtcaaatgttaacattcatttcagtgaatcgcccacgtttaaccatcttgagatgacggctaaaatcatcagggttatggtcacgatggctgataatatacacgttatcatctaacttgtcaatgatggaatcaagtgcttttacgccttgaacgtccgtagccccatcataaatttcgtcgagtaccaacaaagaaatattagtaccagatactttaccagcaacatcacgccatgtaaagagcatcgcaaggtcaatacgtgctttttcgccttgactgaatgatgtatacgaaaacgattcacgcccccgtgatttgattgtttcgttaaactcttcatctagcgtaaagatataatccgcttccatgatatctagataatacgcaatccgatcattgaaatatggaatatatttcttgacgatagacgccttaacaccggaatccttcaacatttctgttacaaatccacgatgatatttttcaagaactagctttgatttttcattagtaatctctaccagttcgtgttccagtttagcaagttcttcggaattgtcaaccctttctttttgtaattcctgaattgctttctggatctgtttagcccgacctacagatgccgttaaattcgctctctgtgactctatagcgcgtttaatttccaagaccttagtttgtgctgtctggaaagaattggccttctccgcgtattctacgcgtttctcgtcaatcagagacagtttatgttctgcttgtgctttttgttcgcgtacagcttgatcattaccttgaatgatcggttgtgtgcacgtaggacagaccccgcctttctcatgcatatgaataacacggtcaaagttctggatctgcgcaccaatctgtgcgatagccgtattaattttagccaatgccgcgctaggatcttccggcataacaacagccaatagctcatcggtcaagcgcgtttcttcggctttaaatgctttagccgattctacctctttatcatacatattctgtaaacgctggatattctcggcactcgccttgctagcgtcttctatgtactttttatgagtgttgatttgttgctgaacgtgattagctttcatttcctgcatttggatattctgggtaatctcgcgcacatacgctttattcagtttatccatttcgcctagcgtagcaatatcaagcaaatcctctaccagtttacggcgacccgctgccggaagactcataaacggaacataaccagcagtgcctaaaacaacgatctgtttgaagctggctaggttcatgcctatgataccttcaaaatattcctgaaagtctttggtgcttgcgctctcgtcgatcttttgaccgtcgcgatgcacttcgaatacttccggcttttgaccacgtttgatataaaactctttcccgtccagttcaaaccagacttcgactaacagtttctttttgttgacgctgttaatcaattggcctttcttgatactacgaaacggtttaccgaacaacacaaagcaaagcgcctcgatcatggtcgatttaccagcaccgttaacaccagtgattagtgtctttttgaatccgtctagctgaatctcaacaggttcagcacccacgctcattatattttgatagcgcaaggttttaaaatttaactttgccattaatccactccgcaatcacacattccataatattaaatgctaacacatcttcatcaatgttgtaaacacttgctgccttcactttaactaatgtgtctctgcgatctggcagcatgatcacataatccagtgtcgcaggatcatatgtcataaagggatcaatgtaaacccctttattcagtgccagatattcgcgaagaccttctataaccctatgtctaaggtaggtcatcgatagaatcattttagtttatgttcctctaaaaattcttcaatttcaccttgcaggtcttccgcttgctgttccagaatatcgcgaaattcacctacagtcaagcggtaatcacatttcaccagtcgatgcgggagaatataccctttatacattgtctctgacgcttccaggaataccccactatgcatgacagagatccaacctgttaacgtcaatggagtattcggaaaataatacttgctggattgtttccactgtacgaaagcaccatatacaatcggattatattcaccaaccacactcttaataatggattctactttgtcttttacaaagtcgccaatgtccatagttaccatcaaatcctgtggatgaatcactttaaggtaacgacgataaccgtcatcataccacatcttaaccactggctgaccccacattttagcaatacgcgctttcagatagccatagatcggattcttgtaatatgattgttttagtgtgtatgtgtgcaccaatttaataaaatgttccattaccagcaaatcagaatcagccgcgaccatagtcgtattcataatatgttcctcgttcaatctcatattgtttcaggtcttctaaaagttcatccactgcttgtttcagcacatgacgcagcgtaaagtaataactttcatcaaattctatttccgcgcgaggaatagagcgaaacttacacttaacagtagtatcggtgagtcgcttttcgaccatcatccgaacttcttcatgctctttggaataccatacatcaacggagatccccttacgtcgagcaaacataggcaacgctgaattaaattccattactttttgtgcaagtgttttcatcgtacagactccatagatccacgcgcaataacattctgggtaatatcagcaaccttacgggatacgatgtttgttagcccctctttggtgatattttcacgatcaaatgggatttcgtcatgagtccacaaaccatagttagaccgaaatgatagcatatactgaccatctcgcacaacctcaaatacatggatcttagtgaatttcgataaaccttcgttgatttctttcagtgcattagtaatcataacaacctccaatcaatttttagagagtataacggggatttctccccgcgtcaactaactttttgcgctatttacttcggctaaaagttcatcagaaatacgcttgaccgccgcaagttcttccggttctaggttttgttcttccagatattcatagaccatctgaatagtgcttttaacttcaataacacctgtttcctgtgatgcgctactctccagcttatggaccacttttagcttgtgcacaacggactctaacgcgctttctaacttagttaacccattatcagcgaccgttgcgataagacgcacactaagccctttaaagcgttctacgtcgattttatcatctgacgggtaagtgatacgcacatgataagttttgtcattctgaataaactcttttttgtgtgtatcggtatcgaatacccaaaaaccacgagggtcgttttcgtcacccgccgttagtgtgtatggtgtaccgatatatgttacgttaccgccatcgctgatagtatgaaaatgaccggaaaacacttcacggtatttctttaggaagtccgcgctataaccttcggattttagtcctttatagaaatagtagccagacaattcccaatggcctacacaatattcactgaatgagttttgaataaactctaaaatctctgatttattgtcatcacaaaaccacgggaacagatcaaatgatacaccatcaaaggtaactgtttccggtttatcgataaccttaatgcaatcatactggcttaacacttcacgcggtgcgttaggctggatcttgtttcgtttaaacatatcatgattcccgaccgtggtataacaagtaatatcagcctcttccagtaacgggatgaccttagtacggttaaatttcatggtttcatgggtaattgcttttcggcaatcaaaccaatcccctgtttgaatccatgtcttaatattatgctctttggagtattcaaccgctttcttgatggtatcaagaatatactcatgcacccacggatcatcgccaccgataccagtatgcagatcacccaaaagcaaaattttcatagtctcttcctctcttcgttttcgatgctctcactatatcacagaaaaataaaaagggaaacccctttcagagtctcccttataaagccattacagcatacttaataccgtttgccgtgtactaatccacatagcagaaagcagttctggcgtgtgtggctgtttgtagatatcacgtaactttccgatagcgtagatatacgcatcacggttatcatcgatgatagcttgttcagcccaccgcttaaggcgtgcaatctctcgcgagttcttacgcaagatcttttccgctttcttagcggctttagcctctagttctgcttgtactttgtctacttcactcactgcaatctggtcatgctgttcatcgtaagtcatgttattttccttctgggatataatcaattattaaagaaaattcatcttctgatacattatagctatgtgagattgtacccgtcaagacctcaagatccggtgatttgatattgcacggatcgataatcaccggaacgccgcaatctctcaaaaataatttggcgaaatacggcacaaggtcagtttcaaactctgcttcttccagcaaacgggaaatgttaattttcaatctcataaaattggtccaggctaggcaattcctcggtcaatacatcttcaacctttggcgctttcggtttattgaccgattcctcgtagttgttgattttatcgtaaatgtcctgtatgaatgcctcatcagcaatctggcacatatcagcgtcgcgttcgtcatatacatgatgcacaaaatatttgtattttgcggctgtcgctgttctctcttttttaatgcgctgtacaaaagcattaaagcacgcttgcgtgatgtaagcatgaggatttttatactttgtctcgtcaaaattaatcaaacccttgaccgccgcttcgattccgtcgtcgatcatttcttcgcgccatgtttgactataaccagaaaagttaaaacgacgtgatagatttttagagatttgcataattgctaggccgatttgatcgctcattggaacttgccgaccttctgctgcaattcgttgtttccaacggcaaatttcttcgtaaagctctttattgtttacataatcagacacttcgcaccctcgctattatttaggaaataaccctttcggactattccccattaccattatactttctttgtttagttatccacactctaaccatctctactgattcaccgtcagacgggtcaagagtttttccctttttcttcatgcggtacttaaatccgttaaatcttgcattctcttgttcgttaaagtcgaacatctttttaaatgattttcgccctttacgctcaccacattctagcggaatcattcggtctgttattacattggcattaggtagaaacgtttttagataatcgaccaacgcccaatcaggaacatatagattaacattctccttgctctcgttgtctctcaggttacaacgcaaacataattgaaatgctggttccagataatcagacacatgacgcgctttcaaaaactcgtttgttgggagatcgcaactattagcaagaccttttaaaatatcaatctcccatcgttgagggttaaagctgaacatcacagcaacatttttatgatgaatgtaagagttaagaccataagatccgtaaggtatccgctcaccaataccatttgtacacgcttcacggtcccgattcacggtataaatgaagtcatcgccacattcatttttaaccatatcaacaagacgttcaaaggtattgtttgtttctgactggtgacgagaccatcgttcggagtccgtcataaggatgatgttaactctatctgtatttttatactctttgaaatatagtctggattctagcgcactcggaacaaaatcgcaatttgcatagtatcgtagatacttcccactatatgtatcaaagagatttgcacatgctatcgtaacctttttaaagtctccccacgtaccgtgtttgttatcgttcaagaaaacaattttcgacccattcttccggtgtccttcgttatgttttaccataacgttgattttcttctctaataacgcctcataaagccctctaagagaagaatcgatcatatcagtaccatcctttgcactttctatcttttctttgatagcggccttctcagagtcttttagaactaagttctgtaggcattccgattcgtcggcgattggttcgcaatgcttcgtgataagttcaagattagacttaaacggatactcattaaattcaaccagttgaggaacttcatcaatataaagagcatattcactaaacatttttgaacgttccatattagataacgctgtatgtgtgatgaatatcacatcagcaccatctttaactgattgcattatcgacgcttgcactgtcttaaggcttcttagtctggtgctatcaatcaagacagcacgaccgcccattcttttaaacttattgtaagattgttcacttaaaacacgagatggcgaagcaataaccgctttttcttttgtctctaggacgtgggaaagtatagcatccgttttccccgccgctggcaatgcgattaatgtttcaatcttcattagaaacccttacgtcgtgctttctggcatttcttgatcattttatcagaaatttcgcgcttaggtgcaatctctttcacaccgaaagcactaatgccaaattcagagagaatatattcaactaacaattcacgcacacgcgctttaccgatattcacgccgttatttttcagatatgtctggccttcgacttgcatcagatctaaatctgcgtcggtaatattgatttcttccatgcgcccaaatcgagaataaaccatgtgtgcgattgcattgtgtactaacataatatattcctcactcaagaattacttaatgatacttactttaccagatccgtgacaatgagcacaacacccatcaccacgcaatcctgttccgttacagtgtttacacttcttcaacggtaaagtcattatagcaaataaagcaataatgaacaccgaaactaaattctcaataatcataaatcgccctcagttctttatagcctccaatgtgctcgttgtcaatgaatatctgggggtatacaaaccggaggctctttgagttcagcctccccgccagttcttcaatcatatcacggtcgggaataatgtcaaccccgacctgcttgaatactggtttaagtgtatacggaatacccagatcatccagtagcttcattgcactaatacaaccataacaatgataagcctctttcggtataccgtatatctcgatcatttctcagcctttaatctttctagttcttcttccagttccttgatccgttggtcacgttcaaagtcacgctgtatcttagtggcgaatactcgtttaaactgattgtaatcatcgattttaaacacttcttcttcgccatagcgacgcacagaaacttcgtagttattgaagaattgttgcatcattgcttcggatgatagctctgctgataccactttaaaatattgatcttcggtaggtgaaaaccaattacaagcataaagataaaccttttcattgtctggacactggtaagccttaccatcgatttcaatcacagaaacatattcaggtatactagatgaatcaatagctaagactttaaacgcacggtccccgataaactcggagatcacacgattcgcatcactggttgcaaatgctttacgcgcttgttcgtttttccactgataggtcataccaacaacaaacatattaccaacctcgctctttaccaatcaaaaattcaacttcacgacgtttaatgtcttcttgaaggtctttaatcttctggcgatcttgcattatttcatccatcttgtcaagtgccgcaatgaaatcatcgaaacgttcaaaggttttaccttcatttgcttcgccaaatttaaccattgtcaggccataacgactactaaaaagacgcttcaactgtccaacgatcttagaatcagtggttataacttccaattcttctacttcttgaaagaattttctatcagaatcaataaaccagctagttcctttatggtcgctatcttctgttgcactcattagagtatggtctttaccatcaatttcaattacattaacttgcccacatagactaacatttttaacagtaaaaggtctataatttattgctcgtgcaataacataattaaggttagatacgttttcagcataatgacagaagtcggtcatagcattcgcatctttccaagtataagttttaccaacttcccatttctggggaacttcttcaacttcacgaaagaattttcgatcgaatggactaaagaaatatgttgcagtccaaatgtcttttcctgtagcagttttcgccgtatgataaacaccgtctagctctattgcattaatccaaccgttaccctcgatctcgatgatggtaaatggcttgtcaccaatagctgcactaatatcgctgttaagtggagaaagaacaccttctccgttagtaataaactcagttttagcgttttcatctttccaagtgtaagttttaccaatttcccatttcataatatattccccttaaccgattttatcaagttcgtttaatgctttctctgcttcctgtatagcttgcaccctttccggcattttgtcaagaaaatctttcaactcttcaaaactggagatatgacgcaaggcgttagcaccgatagctgcatgtgatttgcattcaaagcggattttataattatccatagccagcttgagtaggtccattagtttagattcttctggaatactaatttcttcaaatctgctacggtcgtgatccagaaaccaacaatatagacctacatcggttgaactcatataagttccatcatgaagatatacagatcgcacgtatccttttttcgcatcaaccgacgcaactttaaacggtaatcgcagatatttcaaataatcaacatcataccatttaaaaaattggtttgcatcttttacatctttccatacataggtcttaccagcttcccatttcataatatcatctctcatttttgatacgtgattctaattggatcatacggtcgcgcgtttgtttgtattctcggatagcaccgatccggctaggcataccatccagtacgctcttaataccttctagggtagtaattttggcaatgctattatgtaaccccatcttatcgatcaactgaatgtcgtaggcttccataagcagacccaggcgttctaaagttaggtcttcttctttttcttctgaatctggaatcttaggttcaatagtaacttcggtaaagaaacgacgctcacccgaccaaaaccacacaccagaacaaccaataggggattcttttaacgtcatagagtcgaaatcactaccaataatagtaatttctctaacatcaccatcatcgtcaaggtcttctaccctaaacgggcgaccagccaacaagtcaacaatacatctgttaataaacgacgaaaatttagtcagttcggctttcgacgcttcgcattcgatcttgtaagttttaccaacttcccattccataataatcacctcaaataattttcactggaatactattaacaatcttgtattgtacttgattgtcagatccccgccacggcttcttcgttggcatatctttaatataacgcccatcgatgaacatgtcaactgattctacaatttttctttgctcatcattcaattggtcaagggtataaccagaccatagccaaatatctttatttggcatccatgattttacttcatcgatgatccgctgtacaccctttaaattgcgtttatacaatggatcgccacctaagaatgttagcccctgaataaaatcaggtctaagcagatccagaatcaatcccattgtatcatcggtgaatggttccccgttcttaggattgagtagactggaattaaagcaaccatcacatgcgtgtgaacatccggtaacgtaaagggagactctcactccctcaccgttaaccatatcacaatctttaatatcggcatagcgtagtttgccgtatgtatcagaactcatattcaattaccccgaactcgtttacaatctgcgctttatagtaaccaccgcgagatgctaatagataagctgggcttaggtattcgtattcacggatttctacttgtgcgttttcagtttcccaaatcagtaaagtccacatatttgattctcctgtaaagttgtatctcgtcttgatgaatatagtataggggatctcgcgatccccgtcaagcatttattttaaattttttcgaatgtattcagaccattccttccctgtcatttcggacccattctggaaactgaaatattcatacggcatcgagtcaagataaaacaggatcatacatcgcgccatataataccaatcacgattaaagtaaactacgttatcgccagtaccatcagcacctttatcataaccatcgcgggtacgggcgacccattgaatggtatcatttttctcacggatagtaacaggttcccaatatccagcacatccagcatgaccacacgaacaagtaaggaaatattgaccttttgctttgttgtcatcccattcacgatgaattggttcgatttcgtgaaacagtgctaagcaatcatgattatgcaacactggctcaccatcaatcaatgcatggaatgtatacaaacgacccgtagacaaatagctatcctcacgctcaaccagttcaatagcaatctttttagcttgttctttgtgtcgttgtgctttacgtttacggtttaatgatttcatagtcacctcacattatttcaaagatcgcgatattgtacattatgaaaatgagaacttgcattaccaatattgtagataacaaattcttcatccggcgcttgcgctacaaattgagtatgagcaaccgctacgactttaaaaatacgatccgtgatcttgtgtttaatttcgactcctacttccataggaacatattcatgtgtttctgtttcagtcgcaaaacagccatcttcttcataagcacgaacaaatcgatcgcaatcagtacgcttaacaaattcaagagtatacaattctcgtgaattgtcggtatagaccaatacagaattattatgatagcgaatcacatacaggttattatcatcgtcaattacgcaaaagctacggattccttcgccttgactccagcagatattaaccaccgttcctctaataaaaaaactttcctttaaattaaaactagtcaatgtgctagcgtgcattttaacaacaacaccatcgccaatttccagtttacgaagtttaacttctttgctcagtacacaaaacatcatcatgttgtcctctcgttgttttcgatgtgaacattatacattagctaatcaggttgtcaacacctaaaaacgaaaaagccgaccctttcggatcggctgaaaattacatgtgcttaacgcggtttaccatctcggagtgtttcccgtggttaaatggacgcagatcaacagatccaagatatccactaacgcgacggataacattcatcttttccagattatcatttccgcaatcaggacaaacaaaaccaaactcggtcgctctcatttccttagtagacccgcatacatgacatacatcagaaggagtattaacaccgaagtagtgcaatttatccattgcatagtctactacagtttcaagacctttcaggttgtttttcatgtctgggaactcaacataagagatcatgccaccggacgccagccagtgataatctttctcaaagtcgattttctcaaatggagtgactttccggtctacgtcaaggtggaatgagttggtgtaccagtctttatcggtagcacccttaacaataccaaattgctctcggtccagtcgattaaatcgatagcaaaggctctcggctggcgtaccgtaaagactaaacccaagtccggtttcgtccttccatttttcagtataatgacgcaagatcttaagaatatgtttaccgtatcgctgcgcatcttccgaatcaaacggatgaacaccaaacaggacgctcaatacctcatgtaaaccaatatatccaagagagatactagcgcgaccatctttcaacacttccaaaatttcatcgttttgatgaatacggaaaaatgcaccttctgtatacagcaccggagcaacattggctttagccccttttaaagcgtctacgcgactcatgagcgcatcaaagcaaataggcatacgattagctagctcttgttcgaatagctcaattctgcgcattacagacgctttaccagcacgacgcgcggcaataagggcaatacgcggaagattcagagtcacaacacctaagttattacgtccgtctaatacttcctcgcctttctcattatgccacacacccaggaagctacgacaacccatcgggctaaccggaacactagatccggtgatgctacggttattcttcgcagagatataatcagggtaaagacgcttactagaacattccaatgcaagttgcttaatgtcgtagttcggatcttccggtttaaggtttaatccttcttctaagaacatcaccagcttaggaaacaccggagtgataccatctttacctaaacctttagttcgaacgttcaggatcgctttctgaatcagtttttcttcccagctagtccccataccaaaggttaaagtcacaaaaggtgtttgaccgttggtagagaacaaagtgttgatctcatattccaacgcctgatatccgtctaacgtttctttttctgtcttctcttgtgcatagagagtatcagctttgattccgtaggtttcggcatcagcaaggtgtttatgatatgttttctcaacgtatggcgctaaaacctgatcgatgtttgcaattgtggtcccgccatattgatgacttgccacctgtgcgataatttgagcggttacagcacaagcaacgccgatcgatttcgggctttcgatttgtgcgctacccaatttaaaaccattctctaacatgtctttgagattaacaagacagcagttagtaaacggcatagcgggtgcataatccatatcatgataatgaatgtcaccgtctacatgcgctttatagatgtgctcaggtaacacggttttagcaatctgtttagacacagcaccagaaatcagatctcgacgtgtcgggaatgttcgcgcgtctttgttcgcgttctctttgcttacttcgttttctttacccgttgcgatctctgtaatgtctttgattagtttttccattgtatcacctatgaaaaagcgggatttctcccgctcgttgatagttattttaccagttctgctaattctttttctttagcttccagttcagctttaagctgtttaatctcttgtcgcttcttattagcggcttcctgcttactattgcggataatctgatctagatacaactcccaatcctgaatatttttgataatgtagccgtcaacattaattggtcggagattcagtacagcttccagtttagttgcaaaaactttaattgctggtgtgaagtattcatactcgttatcttcaaaccaataacctagacttgcattatcaatacgaagacgaagtttaagatcaaggtctttatcgtcggtgtaaagatctttcacctgacccagcgaactaacaacaactttaaaacgaattttatctacaccgccaaaaacatcttcaagaatatcagcaattgagctattagcgcaagattggtcgctgaatgcgtcaaggttttctttagttacagtataccaaacatcttgtacccacataatataatcctctcgttgttaagtgggagtattatagcatactcccttcgcatgtcaagcactaacttttttctttactgctttcaccttctggcgaattgctcgaatctcttcgatctctttttcagtctctttaacaatttctttgcgattctgaatatctgtatcgagattatcatcaagtttaggcagcatgtcaatcaagaactttttaaagtctttcaggtttcgaataacagcaccttcgcccattaccgcaacacccacaccatccggcagatcaccaaacagcttaaccagttcagacagatgatcatgatcttctagtgcttcttccggttcagatggcagttcaacaaagttataacgttcatcattgctgatcaagtgataccagcaaagcccgaaagatttcggtgtatattctacaccatcaatttcaaccgcgtcaacacttccataatcatctactttagttaccttaaatccttgtcccagcttttgaacaatttcaacaacatgacttgatacagtttcagcggtaaaccaatatggcagattatgctgatttggcttgtagcgttcaccgactttaaatctctgaccagcagcttgcatagcatgaaattgttgtttcgtgatttccgcgaagtattcaaattcgctacaatcaaacacacaagcccattgatcacaaaaacgatctgccttaacagtttcacctttcgcggtgatcatggtagctgatccgtgagattcttcttcaactaaaaagccatattcgacaaaatcaacaagtttcatggcttctttgtgctctggatcatgctctccccagaatcgcttaaattcttgcaaaccttccggggtaaacgaatagcacttacctttttcaaagtaagtaggcattgcatcctctttcttgttcatcgcttcgtatgcctcttttgagatgcgtttaaagtatttacgctcattgttcataatcatagtagcccaataatccacaatatcattagcggaataaactacatctccagcttcaatagtaataacatgaccgtggtcatctttttctaatactttaaagcccttttctacgatttcagcaacccgaatatgaccacggcgcgaagcatcggtcagaataattgaatagcgagaaaagtctagaaactcatctttaccgccttcacggaatgcatagtaatgaccttcaaagaatttagccataatataatcctctcgttgtttagatgggagtatcttactactcccgtttcatcatgtcaagcgttaaatgacttttggatctctttcagttcagctactttatcggcgctatattttgcttgatgttccatgcgcttaagctcacctttgatataggtttctagcttaggtttattctcaatcagaaaatctttcaagtcatcggcatttttaaagtatagctgattatcaaagctaaaatcttccagcgtcaatgataccaaagaagacttcgcaaacaagttaatcagatcttccagagattcttctttcttaactggtttcatttcttcaaactgctttttagtgatgcgtttaaagtatttgcgctcgcttgcatcaatcatgattgacgcaccctcataatcatgagtttctaccaaatacactttacccataacattaaccgtaagaactttaaagcccctgtgaagcacaccatacaggaacttgttatgttgtggatagcgtttaacaaattcctctgcggactcagcattacggaaagtgtaataacgacctcgttcaaaaacagcatcatttgaagacttagccggatacaatttatacgttttctgtaccatagtataatcctctatcatttcactaattgaacagcacgaaacagaatgcggtcacacggaagcagcataaattcccaacgcggatcaaagtctttagcggtgtatgttttcccgtcaaccgagatttcacttacataaccaatgggtgacactttaagaacagtaaatccattcttgatgacttcgtaggtatctttcaaaccttcgtagtcatcctctaagaagtctttacgtgcttgctcagatttaaaaacataggcaacaccggatttaaacatcttacgcattgttgattctccttcttgattagatgggagtattttactactcccatttcttattgtcaactactatcttaatctttgtataaattgtttcttatacttcttcgtgatctcttctcttgtatcagcgtcgcagtaatcgaaaccttctgcgtccataatagcaaccatctccgcgcgtgtcaagcgtgaaaatcgttttactttatcaacagcatattgaggatgtaaatggttgttggtgtaatctcctttgatgtaattaacatagtttgtagcccaaacaacgaaatcagcacctaaagcaccaacaccaaaccgcttaaagtctccggtcaacgatccttctaggcggttgcaacacgaatgaagcaatccccttacgcggccttgccctttcccatctagatcgtggtcatggtcaagatggtttttgctcatatcctcaaaaagtggcaattgacaaagggggcaaatgcccccctgtttttcgaatagttcttgtttgtactctttagcactcttagcagtcagtaacataaattcaccctccaaagaaggtatttaaccattaatcttgtttttgactacaaaggatcggaactcatcaaagccaccaatataatcaccattatagaaaatctgcggcatggtggcaataacttctacccctgcgcgatcctgaatgtcgacaattatagaatcaatctttacagggcgaccgttttcgtctacaccatcattaaccggaatgtatatataagggatcttacgcgattcacaaaggcgctttgcattctggcaatacttacagttgtaaccttcaaaaccaaaaatttctaccatgttatacctcaatctacgttagttacataaacttcttgtgtatcagaagacttgccacctgaacgatctaggcaataggtcttattcaacaggacgcagtttaaatcattccgcttgataaagtcaaggagatgatcatttacctttcccttatgatgtgtgacattactgataccaaaccgaaaaccacgcgccataatagattctacccactgatagaatttaatctcttcctcgtcactccagaacttattatattccgcagaagtgataaggtacggagggtccaaataaacgaaatcacctggcaagatctcgatctcgtcataacgaccagacgtaaaattgattcgaccgtctttgttttcttctttaaaattcaggacacgctctaccgcgttttcgttaaaagtccggcgaccaaaattagcattaaattctcccttccggttatgacggttaatgttgctaaaactatgctgaatcaacacaaacagcgatagtggatctggattctcgttatacttcttacggaatgccatgtaagcatctttatcatcacgagacaaaccattttcggaaataatccgcttgatcgtagaaaccggatcaggacactcgtcaatcgctttgtaagcatcaattaagcggtgatcatagtcattagccagcacatcaccttcgacgtacagagacacgctcaagccgccacaaaaggcatcaacaaagcggttataatgcttagggaaatacttactaacaccaggcaataacttttccttattgcccgtatagggaattaaacctaatgctttcttcattatcccttcctcaaataagttctttcaatttctaccagttcgaaaaattcttcccaaccacacggaaaattgcagtttccaaaatggtcttcattgtaaagttctttaccggatggcaacttaatatctgttacagtataccaaccgcaacaatcgcaatcaccctcagcaacagaaaccttcgtaggaatttgcatcattgccagataggttggcacgtcagactgttcaaagatcatgtaaccttcatggtcaaacgagacaaaattgtcatcacccaaaaaaggaatgtaatggtcataatcggttacaggttgaccgtgtaattcccattctacaatattaatcttaccgctaaaagtgatacccatcatatcaaccataaaatgggtatcatcgatgtaaatcttactaggagttggataaaccatcatataatcctcatatctcagagaatagaatctctgttaatcgtactgactgctctctgaatgttagcgtatactcgaaaggaaagtcaacacccaacttcaaaagagaatagcctaccgactctttatgcttatcggttagggcgatcctaaccaattcccgttgaatctctttaggcggtgaatggatagtaacacgggtatcatgtaatgtccagtcaccatttcgaattaagattaacggtttatcatcattgaagatcaccgacccctttccggtcggtgaatgttttatattaatcatcaaattctaagaaatattctggaacgatataaccgttaaagtcattgcacttataaaaatgtggtgcatttaatgctgggtgagcgtttgtaaaccgcacgtcagccagaaacagaacgtaattaataggtctaataccgacagaatcagggtctaaacctttttctttcagttcagccagcgttaaaactcgtccagatcgtaacttagccatgatttacccccaattcatcaagattgtgtcgcagcatttcagagtatttttctacttccttgatcttagtgtggatctccacgatctcatcttcactatcagaaagtttaatggcaattgctagcgtgcttttaccagctttcatagtctctttacgttcaaccaatagatccgcgtgtttcagtagcagttcttcacgtcgaacataagcaacagttagagcttcatcagcgatttctaaagcattttcagcgacgccaacaaccattttacgagtagacagcataaattcacctcacattatttcacgttaacgccgtcatcaatccagccgacgctatttggtttaacagttttaccataggatgcatacttaatcaagcatggtttaacatcgttatcaaatcttcctaaacgcactccaaaatcaggaatatccatgtatgcggctttatatccccatgtgccatattcagaatcaatctcaaccggacggcctttaaaagcatacactacaccttgacggtcaacgataacatagcaataaccagccggaagatacacagtttcgccgtaaactttaactggagtagccgaagagataaacataatataatcctcacatcgttcatttgatgcggctattatagattaaccgcattttcatgtcaaccgtttttaaaaatcttcttccggtttatatcgaccgtcatcgactggttttggagtaaatcctttatgtttgcgctgcttcgcttccggtttccccgcgatcgatagtccaagccatttaagaagtttgtatgagtaagcgatgatcacaactacccacgttaaaggccatacaatagaacaaatggcatatgctccagtatcgacctctttggtgtccttatcgaatctggcatacaagcaaattataagataggtgatcattgcaccagtaggccagatataaagaacattaacaatatcttgtgttgtcacgttatcctccttacatgtcttgcagtgcataaaagcatttttcttcgtagtcatagaaaatgtcaaagtatgctttttctacatactcgccattgatccaagcggcagtaacaatcagagtggtccagttagatccgctctcaaccgtaaaggttttaatacccagcttcgctgctaagtcgaacgcaaaccggacgcaaccacggcaggaagtgatattggaagttttgattttaaagccaccgcgagttttagaaatttctactttagcgaaagacaggttgctcattttgattctccttaagaaagtgtgtttcgttttgatgtgtgtagtataggggatacgtgatcccctgtcaacaacttttttatgattttagtgaattaactactacatcaaaatgatgtacagagtacaccttattaaacacatactcatcgtgtttaggaatagcgcctaaccgctttatttcgctcgctgacacgataaaccgtttatccggtgcatttaccttatatgcttcaacaacgcacgggaaacgcgtttcagagagttctggatagttttctgaatccatcaggacaatgaataccctgttacattgattgtagaatcctgtttttgatttcatcaagttttcttctctgtacaattcgtgcaatcttcctttcatgatttcgttggttcttgtcttcacagtttacccactcaacaagatctttacctaactcgaaagcccattctcggtcttgctttacgttttgtaggtatggactttctgacactctacgaagtgatgttgtcgtaacaagaatgatcccaggaatggtcggatgttcttttccatatacaataggacgcgagtcactatcaataccttgtaagaaggtgtatcctgaatcacttagaatcatatacattttcatttcacacatcacagtttcctcaaccagttattaaagcgagcaaaccatgacgcttttcgtgcttcttttactttatgtgcacgaaaaccactgaaacaccattcataatcatcactgaaacatgattcaacaggaacacccgcatttcgtagttctctggtctttatcatgaatccttgacataaggggcgaccttcaacaatgataggaagtttaactttttccatgaaagtatacccagcacggtcaataatttcaattttcattttacattatctccatagatctttccatcaatatcaatttcaccagcgcgaacatctaggataagatgcggtaggtgaatgcagttttcccaccctacgcgcttcatttctgaaacagtgacgtaagcccatccgttcgctgtaataaagtctacttcaaccttgagaggaaagcaagacttttctatgttttcaaatccgataatgtgttttgtcgttgaatatggaatatatccggtgatcattttgtgatctccttatactcaacacaccataagcgggtagcccatgataaacgctcataacgctggcagaaatcggaccatagatattgtgtaccgtcttgcatggttgaaatatgcgttttctcacctactttcacgaaagaagtattcgattttgtgatctcgaccggagtatatccgaaagctggttccaagccaacatctgaactaaatgacaatttaacagaatttgtttttctgaccgctgtccggtttccttctgggtatagcacagcaggtttagcgcctaagcggataaactcagtatttttaatgaacagaatatcatgataaccgtcatattccgacacttccatagtaacaggaaaatcgacatgttttaaacctggtagatctcgcatatcatgaaatgtagccatcaactttttcatattgtattcctcactcttctgtttcatttcttttatatggtacgataacaggattaatacagcaagcaccaattacgttatgagcaccacaatttaagcatttatagtcatggaacttattaaggaatcgaccaaactcataaccgactagcgccgcatgtacttgagtctcgatctcatccatatcagccaatgttttaacattcatagtataatcctcaaatggtagttttgcgaagatggtcattacacgcttttaatgcatcagtcgcggtgtcatagcgagtattatcatagcaccaataaccatctgtcaactgataaattaatccatcctttttagcttcgatgaaagacaattctttgaatgtttctactttctttgctgatactccacggtcacggcgtttatagagtttagctaaaatgcgttcagcttgttcctctttatcaccagacagatcccagatgatgtttcggatatgcttgattaattgtttagtggtcatctttgattctccttagttggtatggttacattatacggggatttctccccgtgtcaacaattaaatgatctctgcttcaccgttaaggaagaaagaccatgttttgttaggatagcgaagcgcccatgattcagcagttttaacaccagcttcgaacaattgacggctggttactttagccataccatcttcgatggcaacgttttcaataatcatcgggtacttagcgccacgcatgaaaccgaagccagcggaagatttgataattttaacagttgccattttttgattctcctagaaagtgtcgtgtttcgatgggtgtattatgcaataacaccggatcgctgtcaacactttctaagaaaaaatttaaactaatcgaatataaccaagaatttcagcgcctttagccagtcctaaaacttcccattcaaggtcgccgtagtcataatttgcaaccatcaactgatcatttttcatgcagcaatcatgagagaaaatttgccccgcataaactacgatagtaataaactttcctgattctggcggtgtggaagacaaagcgaccatatgaccattcagcttagtcaccagtgatggaacaataaaattcgggcttacctgaatccctttcaattcgttaatatctttcatgccataccccttaaaacactaatagcataatcatgctggtcattcataatatcaattgcattgtgataacgagctaaaccgtcaaggataaattcttgtttatcctgttttagcttagtatcacgcgcagccataagagcatcgagaacaggtccaaagtgattatctaattcatcttcggttgcaatgtttcctattgcctcgtcgatccgtgattctaatgcttgcttttcgttgatcacttgctgggtatattccaacacatcaagaatatcgcgggtaacgtcgccatgataaggtattcccgcatgaagatgatcaattaatcgctgaatatcaatgttcaattgtaaccctcctctgaaagtacatcccagatcgttgcgtcaaggtgcattaaattccacataatagagtcataactaccgaagccagaagtaaaaattacatcacactggcgataggtcttatgaaaatcggtggctgtctctgcatcaatcggcatgtcgtcaccagaaagcaccagacatttaagaatcataactctgttagccgttggcgcttgcttagtcttttcagcatatttttcgatgatccgttttgccttttcttctttgatacgtccagaccaaatccggtttcggtattgattcataataacttcaattacatcattttgcattcttcacggtctccataattgttttgtaagccagtttaagatgatcaccgaaaaactttgcagtgttacccttcggatcgcggagcatggtttctacgatctcatcggcagtaacaatgtctcctttctttgctgcatgtcctaccatatacttcaaagtttcttcggaagcaagtgctgcggctactggattaatcattttgattctcctttgttgtcgatgggtgcattatgctataccctattacggttgtcaacacctaaaaacgaaaaagccaccctttcggatggcttttgattatattttattcacgtccatttgtatagtagtgtttgaatcgacctttgctaaactagttaaacatagtaaccaattcaccatcccttccaatgataacccttcctcgtcttagacgggtcttccgattcggcagtaattgaacacgcgaaagtatgaggaagccaaatagttgtgttaatgctagtattcttttacttctggtatgcatcccacagtgactaacattaagccagtcgagtgagtttataaattgttttaaagcatagagctttgatatcgtctaaaacgctctgtaacgagctatcaacatcattataaatctcactagccatttgcgttaactcttgcaaataggcaatttcgctaatctccttgcggacgaccaacgttggttgataatgaccagtgatcccaatattggtttcagtgaaattatcaaccaattcttgcatttcaatatagaactcttctagagccttatgttttgcataagatccaggaccagttaccccaaaatgcgcagaatgcatataagtaacactcatcagacattcaccaataaagcggtcaactttattagcgttcccatcttcggacgtctttcgaaaatcactgaatttcatgttctcgattctccacattatgcaacataacaaattgttgtgcggcatattcccccataataaaacactgcttagaatccatacatttactacgagcatacatcttcataatatgggcatgaaatttctggctggtttcaatggaaggagatattttgtttacatatactatcattgcaccgtcgaaataatcagtaaagtcaccagttggatcatattgatcagcactgacgcttccgaccgcagtaaagcatattgccgctgttagagttttacgagtcattcccccagatttaaaatattcagttatatttataatctggggctttatttatgattaactctcttatttggtagtaccgtcaataaaatgtttacggcacacagaaacatatttatcctctgcaccaacttctatttgagcaccatcgcgaataacattaccatctttatccacgcgaaggaccatagttgctttctttccacaatgacaaatacccttcatttcgaccagtttatcagcaaatgccattaatgccgcagatccttcaaatagattgccctgaaagtcagtgcgaaggccatagcacagtacagggatatttgcatcatcaacaagcgcacacaagcctaaaacatgctctttagtcataaattgggcttcatctacaaatacagcatcaggacgccatcgatccggtctacgcttacctagtgattcacgataaaccaagtcgaaaagatcatccgattcagtgaaggtgatcgctggagcacttaggccaattcgggaaacaacttcactttctgaatctcgattatcaatcgctggcttaagaattaatactcgcatatcacgttcggtatagttataagcactttgtaacagggaagttgatttgccagcgttcatagatgcatagtagaaatataattgcgccattaattaatctccaaaaatccagcaagacctaaaccgatataagtccagataccaataaaaaagatgttaatgctcatggcaaggataaacccttttagcgttttaggatatccgacccaatactcccgaccatcttctaaccggatcaacttattgccttgcgagtccatatcaactacaacatgtttatttcgagattgcaatagatattgttttacaatctctacacccgccataataacaataacgaaaataaaagtccacacaacaaggttaatgatagtctcaagcattttctatcacctccacccaatcaggtgtttcctgaaagactccttcgccttcatgatggtcgcaacctttattgctgcaatacatccaccaatcccacattccccacggtaaacgctgcatatcgtcgttacagcaagtgaagatgataggccaaccacatataacacatcggcagttttctttcatgtgagcggtattaggcttcttcatagatgactccaatataatcgacatttacatttagggcaatgcggttctttaatataatacccgtctgtctttggaacactaacaggagcggtttttatattgtattcagtgaaacaacgaaaacaagttacgttttctacagactgacgtttcacccaatcacctgaatatagatcatttttatttgtcatattccaccaccacaatgttaatgtctggagtagcaatattaatgatctcttctacacattcccactcaaggccaccgataccgcaaccgattttaggaatatagaaaggctgtatagcaccttcaaaaacatcattgagagtctcaaatcctttcaggatagcaccatattcagcatttggacccggtcggaattgggtatagagattcaccccgcaccagttataaccattaacttgatgcgtccagacactaaacccacccagcttttctaccttaccgcgagaagtttgcttgtcaatctctaacgcttgcgggaactctttcgcgatctttgcagcaataccagcacccatagtatgaaaacaattacaaccatgaattaaatgaccgtttccttgtttaaacagggcgatgagatcgccctttacagtatcaataatcataatataaacctctcattagtcacgggaagacaacccagccataaaacggcttaacagtgtgtcgcgataagcaaagcataattgcttatcaggggcagtatcacaaaggttgcgttttgttttagcaaagctggcaatactcagatcccacgctcgattttttcgtttttcgtctcgaccttgtttgtatgcctcgtcaagttcaagtgcgataaaatcactacacatgttatcatcatcacagaaagttttaatgatctttttgttgatctcaaatcctttgtattcgaactttggataagggcgctcattactagcaagcgcaccagccgagaacatcatagcaatcatagcaactattgtcaactttttcatatattcctcaatagcgtttagttttaagaatgcctttactctttagatggttagccttttttagtacgtcatcagcatagcctaacccggctttatagttccatccagcattgtaagaagctagcgcgagtcggatattaccgtttctaacatccagccagtatgctaactcatccatcgcgtagaatgcagaaacctcgcgattcatgataaagttgatagtctggcgatcactcattttaacaccgcgctttgcatttttcgctttcaccgttttaaggtaattttgaaataatccataagcatgatgatttttctttggtgctaagtttgcacccgcgcttgattcttgccatgcgatacccgctaggatgtggcctaaaccctttccgttatagcgaatattcggatggtcatttttcaacttaccacttttctcgaattgttcgccatattgataggcgaaatgtaaattatctagttggtgtgctgtaaagttgtctatcggcgcttttttgatcggtgcgctagtcgatgcgtgtgtagcaccaacggctagtgacagactcaatactatcgcttttagaacttttaacattaatttctcctgtttggcttaactttctgattccataatatagccctatcaccagaaagtcaagcattaatttaaccaatctccattattggtccactttcaaaacaacagccgacattttacccgccagtcgttttggattctctataatcattcggcagcatagaccgtgatatggcttaccgtcttcaattaggtctactgtcatcccgatccacatgttaccgtcagtaatttctaatcgattaggtcggtcttccattttcaggaagtcgaagatctccggtaaacgagtttctatcttattgaatagttccattgtcttatgttcatcgatatggcggtcggttagacggtcgatcatatgcggactaaagcgaatgaaaatatactcaccgtaaccattattcaagcacttttctttgatttgtgcgttagtcttacgcatttcagtttcgaagaatcttcgcagcttgctacggcgaacgtgtacattaattgtttccattttattctcctttcttaaacaaattgcgaagccagtatacaaacgggatttctttaaacttgaatttctctatagttaattctttagtagcaagatgaataccataagcatcatgtgtcacgatatgccattttctatagtccaaatgtgaacaaccgtctggatctaggttaataatagtttctcgctcactaggattatttttccacaattttgtaaccggatcacacataattcgacctagcgtaccatgaataatctcacaacggtaaagttttccagcagtgagataggcgcacccgtcatagtcagtataaacaaatacttctttaacactcatttaatactcctttgttgtttcaatgggggtatattactacccccggtcatgtgtgtcaactactttttcaagaattttttaattgcgttccaaagacctttattctcaggttgttttggttcttcgacaagtgtccacggacggtcgtcaaggtatgcacagcttttcagagaaataaaaagtttgtatcctttatcatctctgatgtaaccgtaggtagacattctttcatccggcgtaaacttatacagtttatttggggtgatgtaagatctactactataaggtgtcatcacatacatcatggcactaactcccatttatcaccgcgaagatgagaacatccaccatcaagaagtatcgtaatacgaaaccccgcatcatcttcaatatacccgatagtcggtggattttcgtcgtctcgtgttggggtaaaatcatacatctttcccggcgtaatatcgtgtcctttattgctattggtataaacttgcattttcttaatctcctatattaactaaccacgggtatagtgttccagaacaacggtcagatgaatatattctaataaatccttccaaaagtcaacatctggttcttccggcataccgtttttctttgcctcttcacgcgcgagtttaacacgttcgtagagatctttcaattcttcccgcacattatcaaaggttctttctcctaacttacatgctaaaatagaaccacgtttagcgagtgggaattgtagatcacctgtctgatagatttcaagtagctgataaccaacacgcagagcatgagaaagatctttccagttactgaaatacttttcagatttggctacctgctttttgagatagccagacaaaccccacataccaacatgatagaatttatctcgatgtgttcggatgtattcccattctctggaggattcaatcaacatgttactaggcgcgtgcaccatatcaatagcgccgatatcacctttacatgccagattgataaaccgttttagactgaacatattaacatcaatatcgtctttggtgttcttgataccttgaccgctagtgctttggtcatagtgttctttcatcgatcctaagataatttctttcgcagtcggaacaaagataccacgataatctttatctgaattttcagtatcaaggccgtataagtgagatccgaagaccattttaaccattgtatgcataattaaaccctcaattgattaagagattacatcataacatcataaaaagaaaaagccaaccctttttggattggcttgatgaaaaattagagagattcggtaaaggtacgcgcgataacgtcacgctgctggtctggagtcagactattgaagcgcactgcgtaaccagaaacgcgaattgtaagctgcgggtacttctcaggatgttcaaccgcgtcaagtaacatttctcgtaacaatacgttaacatttaggtgctgaccaccttcgacaacaggagcaccattatctacaatgacaggacggaagctagttgtgtgcagtgccagcgaatcgacgtcttctgcggtgatcacatggtcttctgcgaaagttttactaacaattactttagcgccgatcagtgctttcggttcggataccagaatcataggcgcgaagtgtccaccaataatagtacctttatgctcacctttcatgatttgaattgctttaaattccataattcacctcttatagatcaggacgttcgtcattaattttaccaaccaaaacaccatagagtttatcaggttggattttacgattctttttaattgtagcacgaaatcgacgagctacgctatctttatttttcattagttgatacctaagccaatgaaaataggttggtcttctacactaccccttccaacactaagtcgattcaattctaaaaactgcaatacgctgtcagtaaatccgcgcatggtagtatctaggataaaaattgttttgtcaagactacgacctcgccatgtgatcggattcaggaaagttcggatagacgtacaatctacatttgaaatatttacattttcaccgcgaccgcgatctcggatcgttttggcatgttcccgcgtcgttgaaacgataaagacactatagccctttcgcgtataatggtcatataacttgattgtagcgtctgtatgccctgtctgacgccctaaattgattgagacgatggaatctaggtcatcagcaaaattgcgtcgcttacggcgttctatgatgccatctacggcagaaacacacgcagcataaatcaaatctttactttctaattttacatcaatattcattgtcaagtctccagtgaacggggagagatccttagattgtctccccgttgatggttaatattttattttggatctgggtatttgctgtgtggcaattgtagatgaggaccatctttaaaactagtccaatccccgccccattcaacaggaacacccaattctcgaccagcttgtttaaatgcatccgcgatcatgcggtagtatttcatgttccaggtatctttatctttcggatacgctacaacgtcaaccgcgaaaccgtgaagatgacgagatttcatagtcttagatttaccttccgcaacatatttcttttgcgtttctagactacgcacaccttccgtaataccaaaatcgaccggagtcagttctaacgcacgatgaacgacttttaccaggtctggatgcacaccaacaagccgatctttgcttctttgagataatttaaacattattcaccccctttgtgagtgataatatttagattccggcgatcctgcatatagttcttgtattagcaccaatcaggatcgcattaacgacaaccattccccaatcaacccactgattattataaatgctaaacccgtttgcaagaccaaatacaagcattccggtacacatactcagagcaataatcaacatcacggtaaaaccaaatgcaaatctcatattattttccttttctctgtttacgtttataaaagtaatacattacctcatcgcgtccggtgatccaacatgctagggcggtaaacaggtttacaattcccaacacacctacggatgcggcgctgtcaacagacataggaacagtaaaggccatagctaacatagcaacgccacaaatgacattaagcaccattataataagaccgaagaaaaccattgtcaatcctccgacacaagaaaaccaacaatcacgccagtgataagacatgatgcgccgctaatcagacaacccacaccaagtgattcccaccagatcagagaagcgacaataacacagaatccccatactaccgcaatcacaacataggcaagggtcgcccaaaacatatatttgttcataataaatcccattcaccaaacaaataagaaaaaagccatatcaacagaaacgaggcaattgatccggcaagcaaaatgatattagagaatccgccgtctatccaggcgacaaaacagaatacgccagtatagaagcataaacccagtacaaagcatactataagcaaccatagataaaacgccatagaaatccctccagtgagctaatttagtgcgggtagtacattaccctacccgtattgttaatcatcgcagagcttcttctagcgcgatcccaaaccatccacaaacaacgcccatacagacagctacaagaagattcattctctctttagggatcattgcaatcataacaacaaccatacagaaagccattaccattgaagttaacatttgttcaaccattatcacacctttaaagtcatagacgcataaacattaatggaagagcgtcgtgtagggttggggggtcggggggccaaacaacgcccatacagacagctacaagaagattcattctctctttacacaacgaacacaaaactctacagaaatctaaacactcaaagtctacacgacgctcttccgatctctttagggatcattgcaatcataacaacaaccatacagaaagccattaccattgaagttaacatttgttcaaccattatcacacctttaaagtcatagacgcataaacattaatgccaggccagttaggatcgcaattatactcaacatcccacaaataaagcggtttagatgtatcagccaagtttttaaaatcttctacccacatttcaaggctataggatggataaactaggctatcatatccgccgtaacgttggcctactggtcggtcagtaaaaactacctcaagatccggtaattctttttcaaggataaccgccagcgcataaatcagacggtcttccttgttacgctgccgaaggaccgttgtcagttggtttttctggttcactagcaagcacctccacattttcacagaatgaaattttcacagacacaattttaccataagtgaagaatgaatatacattatcgagatattcaacgtcacctacaatcacatcaaactgcggatcagcaaccgccgcaacatattctaccagttcatcaagagaatgcaacttaatttcatcaattcggctgtatttggttgcatctttaattttaaaaccacgttctttcagtttgtcaatcagaatttcacgcggagtttcaaacagtttgctcataatataatcctcacattaaatctaaaatttgttaacgacgaattgcataattagactaatcacaaacattgcaaaccaagtataaatgcaacagataaaagctacatacaattcaatctggtcagagaatacaccgggtaaaagcattagcaaaataacaacagtaaagacgctagcgatacccgcaacaaaaccaatatcatttttcctaatcgtcatcaagtcaccgttttgtaaagaaacacaataaaatccaagacaagaaagacagtgtaaatgatcatcgtcaagccagtaaacactgtcagattttcatcgttagttaattcatagtcgcccatccatacaatcacaagatatagcattgaaataatggaagcacatacgaagttgaaaaacatattcttgatcgtcatattaacaatcctcgcggcttaagtcaactgcaattgcatacagcataatgaatatgctagcagatccgagaatcaatgcaccgtcacattttgaaactcgctcatcaaaatgcaacattatcaatccgaggatgttaaaggcgcataccgcgcctatgttcgctaaccaattaatctttttcataatataccttagaaagaaaccgttttcaagaaatccagattttcagtaccgaaaacagaaaagtagtgttttcctttttcggttttagagaaagcgattgtcttctctacatggtgacggaagccagacagacgatcacccaggtcaaggcggcaagcgtaagtagtgccgttttcgaaagtaacctcgatttgagttttgtcatattcgctttcataggcttttgctgccgcgtccagtgctttacgctcgaagtcttcgaagtggaatacttcgtttgcgttagcgaatacagaagattcagagaagataactttaacagatactggtttcatttgatactccttagtgtgtttcgatgaggtaactatactctagccacctcattaagttttaacaaaaagtgctattttctagtttaatgtatcaatcccagacaatccaaacctgtatagaagactttgcatctgggttatctttaaggattttatcaatggcattgtttagcttctctcttgttttgaacaaaccaacaatacaacccattgcttgtaatttaaaaactggcatttacccccccatatcttctcgtttcgatgggtgtattatgctatacaccctctcgtatgtcaacaactttttagtcttttttcataatttctagagcagtttctacagcacctttccaaccttcccacataatggacatagtaaggaagttaaagcacccgcaggaatcaacctttttagagataaaccactctaaaaacgcttcgctcataccatgctctttagcggattcgcgtaattgttcaatttggtcttccatagtatcacctcaacacttaacgttattcaaactcaaacggtctattcaacctattgtaaaagtacatataacaagcaaaattatgctttggctgtaccgtatcagatagacacgcttttacagcctcgcggtccgatggatctacaccctcagctttaagtaatgctaaaatctggttatagcgtactcttagttgtactaatggtaatggtttatcccccatattacccccttatagttgatcagcgatgtaagcgtgacaagcgcggagtttcattaatgcactacctttcacttcgcctacgatgttcataacttctaagcggtcggatggattcatcttagagcaccagatctggttagccaattccagtttactcatatttggttccatctcaaacagttcacgctcaaagtcgataatttcttttgctgcgtctttaaagttaatcattttgattctcccgtttcgttgatggttgtattgtaggggagttatcctcccctgtcaacacttttatcagaaatatgcaatatagtttgccagtcctacagagtcatcattcggcattgcttttactgccagttcaaaccctgcttcaactttctgtttagcggattcttcgttataaccccagattaccagaatagctactacgttttctttgcttactgctttcagtgctttagtgatgcgacgtgccataatttgattctccgtttaagaaagtgtgtttcgtttcgataggtgtattatgctataggagtgatctggtgtcaacaacttttttaaaaaaattttaggcaataaaaaagccactccgaagagtggcttatagggaaggtagcgaatcttccttgtctccaacctgctagcggcctagcaagtgaatgctttagcgtaccggatcgcccacatacgctgtaataaatgcggctaggtgacgtccaaatcattctaaccgcgctgtctttagttcactattatttatatcgctttctctcgcgacgtttttgatcttcttccttgatagagttaaatgcatcaaaaagacacatgacactaataataaacataaccgtattttctacgatatcccacggcttcgcatcagtacagatcccccaaacggtaagaaatgcaaatagtgcagaagagatcacaagcatgatacttgctaagatataaaaagtcattttcatggttttacctcaattcttcgatattcatcacacatccacgcagtaagcaagaatcccaacacataagcaacaaaatacgttaatgcttcttctggttcggtgctatgcgccatcatcagaccagcgagaaaggtcttaacaatcacatttaaaataattagccacgcaaataatttcatcgtttgccccatttcggtcgagtcttttcaaacttatacattccgtaacaatctcgaatcatccacgtaacaagagcaccagtcaacacagacaatacacagaagaagtaaaacggtccggttgcattatcaacatgagcaagccaggtaaagaaaacacatgctaagaatgtaaagaacatcataaagcacaagaaagcgaaatattttatactactcatagcgccaccatacaaaagatcataagaaaacccaacgcaataagaattgcatcaaatttagtgaactcaggtccacctatcaacatcattcgttctatttcgttcatagcgtacaaagccatttaaaagcaccacataaagcgagcagaatactaggtataaacgagatcaaaacaagttggcaaaaatcatctaaggtaacaccggaatagctacctactgtaacaacaccgatcatcagacacagaaagaaaacaaatgcaatcataaacaaagtattgctaaacagtttagtgatcattagacaccccacgacaatcaatttcaaaaacttttttatcatcaacgaagcatgtcacaactgcctcgttgacttccgcaaattgttgtgttacccacttaaggtcagagcgaaacaatgttctattaataacaaatgttttaccgctcttatccttacccataaattttgctttaaccatatccaattccatattatcaccttatttgctaatcgctaaacccaatccgaagagagcacccgatgctacagtatacccgaaagtttcaaaggcagtaaagatatctaagccaccagctaacagagttgcagtaaacagagtaccagctacgaacataaaagttttaccgataaatttcattttgattctcctttcgtttgtttgtgggggtatcttactacccccgtttcatgttgtcaactgtttttaagaaaattttacttcgtctacaatgtctttcatgacattgatttccattccggtcagaacacgttggaacatgtgctgcacatacgctttcaggtattcatttgatggcttgctatcgaaagtctttttagtgtagtagtcatcaccgaaagctactgtaattacattttcgtcgtcgttccaagcgatataagcaaatttgccgttatcccagaagcgagcactaattgctacttttgttgaatcgaatcctacttcgctgtgagattcaagaactacttgcgtgccagtttctttatgaatgtagtagcgggatactaagtcaaagttacgtgtgtagtgacattcgaatttatctttaaacatcatcattttgattctcctaagtgtgtttcgtttcgatatgtgcattatgctatagtcgtttatggttgtcaacacctaaaaacaaaaaaaaaaaccccgaaaaattttcggggtataaaattacagtttggtcgtccactccaggtctagatcttcgacatactcatgagatcggacaatctctaaatcgaactctaggtcagtgccaaatttacgcgcaccaacatcataagaaagcgtgatatgcggtacatattcaggataatcccacgtcgcgcctaaagcagttccgatatcgtgtctgaattgcatgtagtcgctttcaaatgccagcacaagtgcattagtaccggattgagtttcaaacactttcagatgacacagagagcctaagaacttttccccttcttctgggataaacggaacatatacacgagaatataagatagtgctatgcagtttatcacgaggaacggcattaggcagatcgtagaactcctgcaatttttcaatgcggtctagtgtatcctcagtgaatttaaccgccgcatatgtacctttaacggattctctaaacggggtcataatcaagcctccgtgatcagttctacttcctctttagcgtcttcctctgcttcgtctttagggagaagtgctttcacttcttcgacaatagcatcaagggaaacagtgccgttttcgtctggctgaatacccagaatgcgtaccagttccatcaatacacgctcacgatctttcagttggccttctaagaatgcggccttttcttgagtgtcaaacagacgtactttcaggacattaatcatttgttcatgctgattggacatattcacatctcctacttgttgataactttttattaaatgttcgcgagaatcgcgctttcaaattcttctaatgtaccattatttatgataatggtttcaccgtcaataggcaaaattcctttttcggtggagtgagtcgatacaataccagtatcacgctgaatatgcaacaccttagcacccatagcacgcacgagagcaatttcaataggctgacgcacatcaaccactacaaaataaccttcttcatttttgcgcttcataaactcattcacaaagagattacaccaataaagcggattgatcaagttaaccattatatcagtaccgagagtggttaacatgagacgaatagaccagacgttattatgtttttcgccaatctcattaacgaccttgtaaatctcagccagacgatcacaagtaaaggaactaccgccatacttcgaatctagcataagcagacactgaataaaccacttatgcgcggtataggtatcaatacctagatcggcttctctgtcacgccctaacccgtcaaagtcaagataagtcagacctaagtctggttgacattcacataagatttctttgatcggtgctgccagttgataactatgtccatcaatgattaacgcggcagtgtcttttcctactcgctttttaccacaaagtgcaatcaatttcattatataagcctcttattactttctaaaagcagggtgcatagctttaataccttccaccctctgacgatccgccgcctgaattgctgggcgaggaacgatcagttgaccatcacgttcaatgctcattgttttaaagggaagaattgcagtacacaccagagattcatgcatatcattggtgtatgttaactcaagttcccccaattgtgaacaccaacaaccataaaagttaaaagtgcacacaatgttacgtcgttcgttgtccatcatgtgaacttgaacggcttccggcattgaatccttccacgcagtggagttaccgttattgtagtctactatagaaagcatccatgtgtaaaggtttagatagctttccaaatgctcatcgacaataaaccggactaccaacgggtcaaactccacatgactagacggataatcagcgaccgccaaaccatattgaccagcaacttgcttagtcggtggaatggttatagccggaagtgtaacaccttgagcatttaaagtaaagccttttgttagttgtccatctggaatattgatctgccagttgctggggttagcatagttaaagagattagacattactgattcctcaaatgaaaatatttattaacaattgtcgctttgcgacgtgccggaggcactgactactttttaaccgaaacaaatttttattattctaaagatctttcttcgttttggttatgttttaaccaataactatatttttataca

SEQ ID NO: 12 - DNA, 167034 bp, bacteriophage
tttatttaaaacgaatagttgaatccttaaagaacagcccagaacatactgttccttctactttctgcccggtaggtccaatagcacgaaatccagtatgttggaaatcattttcagagcaaccgaaccagttatatccagtgatttcaatattcgtaaaaccacttgatgataaaattttagttgcattatcagcatcagtacatcctactaaagatactgctaatactaatgctgcgatagaacgattaatatatttcataattttcacttaaatttaatagcttgaagaagactaataattctcaagcgacttctttcatctttaactgtaaaggaaagagggtcgccagatttcatggtaatagtgcattcaaaatcaaaatcttctgtgacttcttcgaagaagtcaaattcttcagcataaattagaacattactctgcatactgtgaagaatttttccgttatttccagacgctgtactaatcatcgtaacattatgacctttcatatcttcaacgataaattcgcttgtagatattacagcattaatagaaccattcctataaatagcagacattagatatttcttttcttcgccttcgcgaatacgatatttcttaccgattttaaacataatcaccctttaagtaaatcgtaaaaaccaccattcacatgcttaggagcagaaggccgacgagtagacaaacgatgacatttagggcaaacatcattttctcgttcagaaatctttttaattttttcatattcatgcccgcaatctttagattggcatttataatcatacatcggcataattattccttaaaatgtgctttcaacatctgatacaaggaccatgcctgttcattattttcaatagtaactttcatgactgggaattctgtgaaatcttctatttgttcttgctcttgctcttcctgctcttgctcttcagctgcctgatatggattttccacttcatcaaagaactcggcttcgttagtagagagccagataaagttttcgtcaaggatatcaccatgtgttgcatatccaattgtgccagtaaatgacataattttagtaggacgaccaagatggtcaacatctaaaattttaaaaggatgcatacctaaacgtcgtgcataaattccgttatcagtatggtctttaataaaagcttcttgagcttgtttatttttaaattgataccatttattaacttcaaatttaatagccattaataaatttccttccagtaagttgtgccatcttcagtaatttcacgaaatacaccgtaaattggttgtttatcaccaaccttttcatacacataaaccgaagtcaagtgagtaaacttgatggtgtgttccttttgaaccactaccaaatctggatcgaataatacatcttcaaattcgtcattagtgcaattctgaacaattttacgtttcattacaatttcctcattaattaaacagtggagcgatacgtttcagaagagtagcagcacctttggcgaattttacatcatgaaaaacagtttcttcttccgttacaacacgagctttaatgttttcacaatcccaatttttgcgaacaatcttcaaaagctgcagtaaatctttacattcagcaatatcgataacacatccacgagaatcttccattatagcacgataaccgtaagccataccataatcgttgaaagattgctcgatgataattaagttttccattttattctccaagttgttttctgtatcagtagttgatattgatatagtaccataatcaactactgatgtatatagttttatgaaaaaattttaaactttatgcaaatttatgctaaagctgcttcgcaccattttttaatttggaattcaggaactaccatgaactggcctgcaaaaacaatattgtagagcttgacaccatcttctacccaacggtccgaaataaaaccagcgacttgattcgttgtccatggagttccatctgttgccgccgcaattgtgaatttatggtcttttacaactaaaactgaagaacaaagtttccatttaaatgcgctttcttctggctcaatgaactgacttgagacataaccaatgttaccatcagcgtcacgaactttaacctcgttacgaccaaaaactggatcacttacagaaagaacttcaaccagctttcctgcaactttagaacgagatgcagacgatacacgcttaatttcaccgatagtaatcataatttttctctctttgttgttaagatttatactccgcaggaccattatactctggtcccaagagtttgtaaactagcttacacgaacattaatcactgcgctgcgaggaactacagagtactctccagcatgaactacgttcagaagttcaacaccatcttcaatccactgatcagtcacccatccacccacaggattcgcgaatggacgacgaatataaactgccttacacagcagatcagttggatcttcaggtttttcaatttctgtcaatagactaaaatctttttcataaataataagcggtgataccattccataatagtttctaatttcaatatacatcataccgataagaattccgctattaacactaataacagtaaaaggatatccgccagttaaaccaagaagttcacaaaacttattataagctgcattagacagtaccgaaaaattcttaatttcatcaaattttttcaattgataaacagcattatttttaatcataattttctctttaatctaaggtaataaagccttttaattcggcatgggatttacggaacattacttggtgcccgccaatgataacttgatcatctggaacttcgtatacagcgagataaaatcctttagaagctaattcttcacgctcttctcgtgtgaaccatctcatcatatcatattcgctagcgaaagcaaaatgataaagagctataaaccatcctggaatatagtgatctacgcctacatattcttctttctcaaaattagtattaattgctatattagcatttttaactaataatttgtcttcatgcggcacaggaattcttttattatcattactatgatgcataaaattgggtctgtcataacctacgcgtaataaccactcttcactccatgaatctattatactcctgtacggagttatttgaacacaaagatctcgacgtattgttatagcatcttcataattaagaatactaaacgatgattcaacacgataaattttcattttattatcctcagtagctatggtgttatagtaccacaactaaccgaggaagtaaacaactttttatcgttttgttggaagagatagaggatcgcactcttcctctgacggagcatcttcaagacccatagcatagcgtaaagcgtacttcatcatcaggatgtctttcgcacagtcatgaatagaatcatgtgcaacgaatccatctaaagttccctttggaagaggacatgtggtcatatcacgaacaagcagaagtgcttcaattctggtacgaatatcacgctgattccagaatttacatggttctaacttaaatgtgtcaagctcattctcagaaacgccgttaagacgttgaatatcgcgaatgagatcgactaaaattggaaaatcaaacgacattccacggcaccaaccttgagatttccaaggatcgatattatgtgcattgatgtaatcattaaattttgcaataccgtcaatagtgcttacatcttcatctgatggtgcaatattttttctagcttcaggagattgattcttccaccattcaatagtgcttttagtaaaaagacgatgtcctttttggctttttaaatcaaatttgattttaatgccacgtgaaactaattcatcaaatgtttcaaccacttctggattagggtcaaaagcaattacagccaaatcaataacagctgctttttcaccgcttcccattgtttcaaaatctataataaaatcaaacattaaactttcctcgctaaatcgcgaatttggcctacagtatagtcttgaatataaactttattaataggctcatcaataaattttgccatagattcaatatctttttgtatctctttaagactgtatactatctttgaagctttttcgcgaatagtaatattttcaggacctggattttcttcaatgacagctttaacatttgtcataagagatttaaactggtaccaactcaactcaatcattaataatcgcctcataaagatagctaatttcgcctaaaacgtaatcattgattgtaacagttttcacttcaccgcaaaagaattctaacgcaattaaatctcgttcaatttcttctaattgaagcatcaacttattagattcaatttttacagtttcacgatttttaccatgagcaatttcataaatttcgctcactttatcttgaagcagataaaactggtctttagttatttccacgaatagcttcctcaaatttaattagtaatttacagatactttcatctagtgtaattaccgtatctgtattactgtgatatgattgtttttcaattcgtttaattgctaatatagtatcacttataagataaagcttatgaaggagctcagctcctgttaccataacatcgagattatcttgcttattagtatgcttccttataccatctattagacgatttaaatattttgaattgatgttaatcatatagcctcacacataaaacacatcataacgaccacgtgttacaccaacataaagaagttgttgagctaattcagcatctgcataatgaatacaaggcgtataaatgaaagcacggtctacagacataccctgagctttatggaatgttgatgcaggaagtgctttcactttactaaactgtgatttagcatcccaaaaatcactccacggagcttttccgcctttgttccaatttttataagtttctgccgttttacctaaaaacaggttaaacttatatagctcttcatcagatgaaattattttaatcttttcacgataatattcatcatcgccataagtttctactgttaaatcccaatgacgaattaagtattctccaggaacaccacgagctttaacaaacgttgatgtatactctgcttctataatacgaactaattgtccgttattaaaaataatttctgacacaggctttccatcaattttatatgttttaattaatggttcctgcattacaataatttcaccaacaataaaatctttatcagtttcaaaaatctttttacgaataatgctatttaacttgtcaacagatttattcgtaaatgccattacgcgattttcaaacaaatcatctaatgattttacgattgaaaaataatttaccataaaatcgcgtaaagcggtatcaccagtaaatccacgtactccatgcccgtcaacaactttatcataaatccacttaccgttgcgaacatcagtagctacatcaataataggagcattactgcgtttaacttcagtaagttcacactgataaaaatctttgtgtgtaaagaatggactgatataagcagtattttctcctggatcaacaggtctaatttgcttattatcacctattccaattatagtacaccaaggtggaatagttgaaagcagaattttaaatagctttctatcatacattgacacttcgtcgcagattaataccctgcatttagctaaatctggtacttccttctgttcaaaaagaacgttttcttcatacgtaactgggttaattttaagaatactgtgaatagtactcgcttctttccccgacagttttgaaagaatctttttagctgcatgtgtaggagctgccaaaatgataccagtttcgcctgttgatattaaagcttcaatgatgaacttagtaagagtagtcttaccagtaccagcaggtccattaatagttacatgatgtttcttttctttaatagccctcataacgatgttaaaggcatttttctggccttctgtcaaatcatcaaatgtcatcggaaagtccctgcaattggaatactaacaatacgcccagtatctagaattcgttgatataatctttgtgtatctacatcaggcttaacatgtttaacttctattttattaaaccaaaacttgcgtggagtctcaactagtcttggaattcccatatctaaagctagtttatattggtctttgagagtagtaaaaactctatcagcaatctctctttcaaaaaacacagcaggacgatgttcatcaagcggaactggcgccgtaaatccgtctttgtctcggtaaactatcgcatatacataaaccatattatcctcggataagtttaaaaattgaacaatttagcgggtatcctcttttcagtttaagtttatcaataaaagacaagttttgataccgctctacaccttgaataattttatcacacatatcatattgcatttctgcttctgacaactttttcacagttttccaatccgagcctttaagaagaacgttcaatttaacaacttcagcgccttctgctatgcgagaaccatcaatacgagctttaagtgctataatcgttagcttaacgtcagaagtttgttttgatttagaaagctgagaaatgtgttcaattcgattttcacgttttttctgtatagctttaatttgattataagtctttttgattttagcccatttcttttcatctaaatttagtttatgaacttttttcgcagatgaacgaccaattcgcaaagcaaataaatcacgcttttcaatcaactcttctaaagtataatcagaacgaaatgtattatactttttctttactgcaataacattccctttaatgtatccaatgttattatcaaaacgttctaatgataatttctctccttcaatacgattatcaaaaggttctcccgagtaagcacaaactttctgatctaaaatgttcttaatgtaattgaagtctaagttaaaatctttagaacgtctttttgcagatgcctgagtatgctctagacgacgtttaattttacgaatttgattattagtcagtttcatatttttctcacggactggttaactacttatactataacatttttactttaacttgtaaacaactttatgtaaaaatgctttaaaaatttcatggtataatgaatctaagtccttccattatagattaaatccttcaaaatcaagagtatagatagtgtatgttgaatactttttgtactcatatctatctgcaattctaaatacacttccagctggtatcattacttcttgttcatctgaaactaattccatattacgataacgatggctatccggaaacttaaagtttggattgtattctttacagcgtagagcttttatagcatactcctggaaattgaataccataggagctttgaattcaaaaataacttgtgtgttatactctaaaccagaagcaaaatgtagagctatatttttatcatatgaagctgatacgactttatcaaatgtaataatatcaattccttgatttaacacctgcttagtctcagctggaacacctctccaaagaggtttatcgtttggaaccaaacgagatttgattatttcatttaaccaagtatggtcatctggtttgttggtaatacaatgaattaaaagttcaatttcagataaattaaacccttcagaaagtaattcttcacgaatagaagcacgcaccgatgcatccattgattttattttaaaatcttttagttgcattactgagtatttcattcaattacctcaatatcataaactttaaatgttccaaatgaatcgtgtaatttttcttttgaaatagaagttattttatactttccaattggaatcatccattcttgttcatgtacaatcatcattaagttatcagttctttctgaatctaacccatcagtatcttcatacgtgtacttaaactcagtgttaggagaagaaagtataatatcgctgatatggtcagaataattaaaagctttatcagtttttaaacgaagtattgtttcagtgaaatattcagcataagaaaaagaacacgctgtatgcaaactagtagtaaatgaatctaccctgttcgttgaaaacacttctccaacttgtaaatctttaataagttcttttgtcgattttgatataccacgatataattgataaggcgatttagttaaatgctttttaatgattttattcaactgcctatgaatagcttcattctttttggcttccatacattgccaaagaacagactgctcaaagtcagtaaatttttcacagacttttttatacatatcatattgaaaatcaacgctttcagcttttatagataactgttcaacatctgcaggattaataatcatgatagcctccgtatacttcagaagctatcatatcatcgttagaaaggaaagtaaacaactttttgaattattttgcccagggagcccaaggcggagggtcaagatggtatgaagctagttcttctagaagagcatctggggcttcaattccataattctgtaatactatacggtactctttcttataatcactagaatcattctggatattcgtagaatgattatcttctaacatctcaaataaatccatattaattcctagcgataaaaaccaaatttacgattagtttcaatgatctttctttcttcttcggacattctccatcgtagtccaacatcaaaatgagcccagaccatcttaacaaatgcatttatatctttaatatcttcaataatgaatgttttacttttagaaggttgactcgctaatttaactttatcgtcttcaaacatgtcaaaaagaccatattcatgagctcttttatagcctttaatagttaaagcttcagaagaagaaaatggtgaatctgtattctgcaaaatatcttcagtatgctttataattagaataacattttctggatattttctttcttttatatctttaattaaaatatccggattttctgctaaaggaataattaacgagcattttttatcaagtgtatttactgatttaccttctttagacataaattctattgaatataattttgctacttcaatcatgtgatttccttttgcctactaatggaccgtcaggaattttgttttcctgaatgtatttctcattttcttccatcattttactaccgattttaagaagcaaatccattgcttcatttgcttttgctttggcctcttctaacgtcatatctttgctcatgatttatcaccgtaaatatctctcattaatttaagagctgagcgctctaatttcttttctttctcagcactaatcattgatttcatccattcttccgattcgttctgcatttctttatttgcctgttcaacccaaccatcatcaatatacattgagtttggtctattgaaccattcaagcattttcttcagaactttcatttgttttacctaaaacaatagtaggagcatcgtcaaattcatgaatttttagcaattttggatttaaattattccatacataataaataaagtatgataaagcatcttcactcgcaattataaatttatttccttcatttattttccagtcatatactgaatcgtacgaataaaaagataaaggattaccattatattgttctgcgctaacattaatgtattcggatttagtaaatgcttcaattgctctaaacggactatttggcacagtttcaataattccgatctttttaagttttatttcaacatcttctggaactggcattgaaacgaaattttctacgagatacatagggttacaataacccttatcaatcactacggctacagtaattggaacatctttagcaaacgacatgctattactgctaatatacatttcaaacaaaatcgcttccataattttcctcaatcacaagatgtagatgaacaactagaatcacaagaacttccacatgaatcacctgcccatacatgaacaggaacattggtgtcatatgaatcagaactagactgtgtattctgtgcattagatgatgtagtaggtgttgaccaacgccaaggatttttataatattcttgggcttcttcataagtcatagtaactgcttctactgttccatctcccatataaacatattcaactacagttaaaggaaggtagtcatttgaaataggaactacaccttctccgggagttgtagagaaaaaatctgtaaagaaatttttaaaccaattaaagataaacattacaaaaagcctcttttgaattcgacttgcttctcgccataatcatatcgaatctctgcattaaattcgacagaaccatctgcgtacatcataaatgaatgcacaacaacttctgtagaccatggctgcagttcatattttttcattacatgccgtgaaatgataatatctaaatcttcatttggtttaatccagcgatttaacatagtgctctcctctataagataattctattataccatactcattttggaaagtaaaccggtaaaatgaaaaaaggactccttcaggagtccttgaattattaaccacctatttctgtaggcgtaaacattgcagcattcttagttttccaagttgctgcatcggaaactacatcagaataagctgctttttctgacggaaagatttgataatgagaatctgcgatacggtgttcatttgaatatacatcaaatgctacagaaacttccatacctttaacttctttgccttcacccgctggatgagtaaaggtcttgatgttaacgaaaccacccataataaactcctttattgtttaattacaggtgtatttatatcagtcttcaatgaaaacttgtgctaggaattcgtgttcatcatgaatttgtttatataaagccattacagcatttatattagagctatctactttaagctgataagcataccactcgtgtaaattaattaaagctttttgtcgtctaataaattcttctttggatattttcattttgaatgctctataattaattttaaagcttcttcactgacaaaaatttcatcaggaccttcttctacaacccaatcaaccacacgaagctgattagataagagctcacatacgagctccttgtcataatttttaaatagctggtcaatatgtttcttgtgggctttcttaagctgtcgtttatttaaacgagccattagtaacctcggtcttggcgagcgaagttttcagcatttttcagataataaagtttaaagatttcttcagccgtaagaccgagaccttggaacatgttcagaacgaaatgaagaatatcaatcatttcgaatttaatttccaactggtcttgtggagacaaatcagtaatcagagtttcacgacgttcaccatgttgagctttccatggcttccatacagcagatgcatctttttcaccattgctcataccaccaagagaagtcagaagttcgcggaattcatcatcaatataatctttctgattgcgcagccaatcaacaacttcacctgcagtagccaaatcatcaggatgacggttatattcaggtttatctttagctaaacgaacctgcagagatttctgcatatcaagcataacctgcagcgggtctttttcatcaccgagaatatcccagtattcattttgagctttatcagcgccttcgatcagttgtgaacattcattaaagtaagccattattttttcctttcaattcatgggttagtagattaattatacaataaatatataaagcaataaggaggacatatggtacaaaaattaatggcacttgttaatgccataaaaggtaataaaaaacgtatagcttttactatttctgctatggtaggaattttactctggaactttattctatcacctgttgcaattgcacatggtattaatattccagtagttactcttgatacattcgtagatttagcatttgctttagttgggttaatttaaatcttagcatatttagataacctcattttagccatcaacccctgggcaatattatttttcatatatttcataatttgttcaggggttgcaccttcctttctaatcatatcattgacatcttttgatttccagggagatttatcccaaaacataaccctttctcctgcatcaactaatttagtcattcgtttgatagtgtcagggtgacgaggttcattatctaaaacccacactcgtctatctttaaatggaacaacttctaggtctaattgaccacccgtaatagctataccattttcaataaaaagtgaatctataggtccttctagaacatatacatcaccatctttaactcgttcaacaccgtaaatttttgttgcctcaggataagctttaatggtgatatatttttgaggagcatctttctttaatgcacgtccttgaaaagactcagcttttccattagcattataaattggaataacaagacgaggctcaggtatttcctttttatatgttcccggtgctatgctattaactaatttaggccattcagttgtaaaccaaagatatttccatttatcctttggaatacaacgagcttttacatattttataattgcatggtcttccgccagtttatctaatcgaacacatgacggaagagatttaattattttcttctcaggttgtttaggaagttctttaggtttttctactggacgacttttacctttttcttttcttatttcaaagatatactcacgatataaatcaggttcaaactcctttaaatatattccgattggtgcatgatagttacagttataacaatgaatatttccttcattattatcaccataataccatccacgagctttattctggtcggtttttgaatctccacaaacaggacatctaaaccgtaatttaaaagttgaactattatttacttgtgtgaatttaggtaaatgagctaatgcacggtatgcaaactcattatcaatccaaggtattgatgacatttttactcttctttttctttagattcctcttttttctttttaggaatctgttcagggcctttatttactacagcgcctgacgttgttccagtagagatattttcaggattaccacctgaatctccagcgaccatatcttctttgataaattctttatatgttttcatattaacctctattcataaaagcattaaaaatttggtcatcaatagaaacatttactttagactgtttttcagatggtaattcgtatccacatattacaattttatgatcaatattaaaatacacagaagcaatatgattaatgatgttttcagtaaagtctaaatcaacatcaatatctttttgaccacagcccaaaggataaataatgcgagtaattcgattatctttaacaaagattccaccgacatactctgtactgcgtttaaagtctacacgccgacgaaatgaaaaatattcaggctctttatgagctcggctcataggacacaacgaataactagaataagagatgtcaaatcctacgccttcgatatgagccaaagtgtcatgattaaaccaattataatcgtacgccaaatccattagattataatatgtaaaaggcaccggattaacatcattagtcacaagcatgtaattagcaactgctataatttcattgtttttaacgaatacaaaccgtgattgatgcgaatgacctggacccgcgttttcacgattaatgatataacactgggcacctttatatttgtatgtatctttgcacttgtgcatttgatagagcattattcacctaccacttcagcgatgatatttttgttattaaagtttttatcgcaatacagaacataattatactgcattacaccaccagacttaagttgtttttgcacttcagctttcatttcaggacgatcgcgctcaacgatattcataatatccgcttcaatttgagtttcaacttcagtctgatccgcagtcatagaccattcacacaaatctttatcataacctgccatagcaggctgagcagcacaagaagctaaagcaaaaattgtggcaaagataaattttttcatgataatctcctcagtagtttatgtttatatagtatctcaatttccaacaaaagtaaacagttattttaaaacttctgcgtaatcacatgttacaaactgtttctctagcttgacgattttacgaaagtatcttttgcattggcgaatctgtcgcttcgtaggacgtacagcaaacttaataaattccactcgaccaaatggaggactttcttctgctggaatatctaacaccaattcccacgtatctgcaataagtgctttgaattgagtatttttcctgatgttatacggtgtaggtttaaataaaacaatatgcatattatcctcggcaatccacttcacatactttcttgtcatcaatgaaagctttaactaatgctttattaacttcagcatattgagtagtagcccattgaacgtcatctttcatcattgtgatttctttagtaaacatgctttcattcttaaaccaccccataaaaactacctttaccaattccataacaatctcctcatttaaccaacaagactactataccatagtcttgtcagcttgtaaactaaaattttaattcatttgccaaagcatctaactgagctcgagtggattcatttctttgatagcgattctgctcagcctgaatctgttgtgaacctgctacttcgttcacttcagttggagtagaatcttgttcaatttctacccatttctgatttcccttttgaacacccatcaaaaacttattccacttattcttatcgccatatcgtgatttgatttgcttaatgagttgttgttcagcagctgctagctcctcggtttcaatgaccgcaagcataaaatcagctgttgctggaagaccagcagattctgcaatatcgctcatgttaacatcggaagagtcccaagcttgtttaccgacctgtgctgcagtccaaagaacagtttcggtttcaacagccagagcacgcaattcctctgcaatagctttaacagttgtgtaactattttctgaataaactctgatgcggcaagatttacaaatacctagatagtcgacaataatgattgttggaacaaaattcttcttgagcttcaattcattcaagagagacctgaatgtgttagcgtctgctccaccagtaggatactgtttaacgattaaacgaccaagggtagatttctcacgccatttttccatttttcctttatattcagcgtaagaaatatgcccatcatcaatgtcatcaagagaaacatcaagcatgttagcgtcaatacgcttagcacagacttcttctgccatttccatggaaatgtaaagaacattatgtccgagctgtaaataatctgctgctaatgaacacagacctaatgatttaccaacgttaacgccagccattaaaacgttcagtgttccagtctcagctccgcctttagtaattttgtttagaattctgagtttaaatggaactttacgagctttattcatataagatagccaacgtgcttcatagtcatccatccaatcatgaccaacgtaactatcaaatgaaatagataatgcttgccgcatgatgtcaggaatagcaccaacatccggcattttcttatttcgtttttccggaggaagctcagcattagtttgaatttcgattattttagacgtagcattaaacatcgccctttgctgaacatatttttctgtttcttttactaaccagctgtggtcttctggagaatcagccagttttgaaataagtgtttttacaccagaatattctgtttcagtaaatgaactattttctaatgcaacatttaacgcattaatagatggaacgctatgatactcattgacatgagatttaattaatttgaatgtatttttagctggaccactttcaaaatattctgaatccatatatggccaaacttttgaaaaataagcttgatcaaatataagatgagaaagaataatttctaccacacttactccttaaaagaatttaaactttttctttgaccttttattaaatgcatcttgtagttgcattgtaatacatttttctacatgaggagctaactcagcttttctttcttggtcaagaacagcaaagtccattacaacctttccatcaacccaatccagtttagttacatacactatatgtgtagaaccatcttctagtttaatgacaatctcctggataacattttccatggcagatttaattatcttaagagactcgttaaaaagacgttcttttctttcttccccctccgaagagggggattcatcgataatttctagatctaagtctaaatcatctttattcattaaattcttccatatcacttaactgctcgaggtcagtttctaaatcagctgctgatttacttttactttctggagatttaaatttttcaacctttgagttaatcaattcatcaacttcagcttcaacaatttcattactatcaatagcacctaactgataagcacgtttaatagcatctcggaatggttgatgcttaaataaaggaccccagaatgtagtgcagttggtatcttttgcacgccaagatttttcttcgcgaatcatctcgccagtttcttcgtcaagaaattcacgagcataccaaccattcttaggttttacaacaaatcctaattctagagccatatctaacaatccagaataaggatcgataccaccgtcaaatttaacatcaataaagaatttacttttttctttaacggtacgagatttttctacatttagaacaaattgatacccctgaagatcagaaccatctttaatctggcgtttaccgataatgaatacagtatcagccgaatacattacgcctgtaccacctgtcatcacggttttactaaacatttcaattgtttcaattgtatggttaaccgcaacacatggaatatttttaatgctaaaataaggagtaacaatacggaataatgacttcagtgatttagcacgagtcatatctgccacagatttttcattcaaggcatcttccgtttctttcttagaagccatattaccgattgagtcgatgaatacaataaccttttcaccacgctcaatagcttcaagctggttcaccatatcaattttcagctgttcaactgactgaattggcgtatgaattactcgttccgggtcaactcccatggatcgtaaataagctggagtaataccaaattcgctatcatagaatagacaaaccgcgtcaggatatttgttcaaatatgccgcaaccatagtcaaagacatatttgatttaaagtgtttagaaggccctgcgaaaatagttaaaccagactgcatgccgccatcaatcgcaccagaaatagcaatattaagcattgggatttttgtacggattacatccttttcattaaagaatttagatgtagtcagttcagcagtcattttagaagtggaagctttaatcaaacgggattttaaatctgcaatagacattcattttttccataggcatcattatattttcctcactggttaaagatagagtaattataacacaataaatttaggcattaatcaactgctattggatgaatagcattaaacttatgaaatgcttctgatttttctttacgcgaaacacacatgcgaagaacctttaatggctcgtcttcttcacccaacgattttcgtttttcaatattcgatgttttccaacgagcttgctctggaaactctctattgatttgctcaagcgctctattatgtttagaattactgcgaattgaactacacccgccaggagcttgtgcttttccagatacaaccagatatttgaacagggctaaatgcggataaccttgattaattaaattgagaaatgcatacatatcttcgcataaatcaatttttccatacccaatttgttctgtcgtaagttttccgaggtcataccatgtattcgtgaatccatatgaattttcacgataattaccccaagatgaagtaattttaaaaataggtagacgagcatggccatgataatacccgcaatccatggcatcctcaacatattgaatcaattcatagaactgttcacgagtcaattgattgactttatctacgcaacgacgatcatctctttttcgcattgaactcatacgaatagtagtatcatcgtcaatcatccagattcgttgacctgcatacatatcggtaattgctttacgagtaccggcaattccgtttacatcatcaggaatagttataattttagctctagacccataagcgtcatgataagctttttcttcatgttcacgcactacaatatggggttcataatcagtcggaaacatatcaagggcagaaactgccccgacacgctgataacttggaattacgaattgaatcatttccactcacctttatagtcttttttcacaatatgagtttcgccagtattccaccaatgatcaaccaagtaaaaatgacgagaatatacatgaagacttccgacattccatataatagaacccgctttatactgacgagttgaatcgcctgcattcaaatcagatactaatttatctaatacgtatttttgccatgcataatcattacggaatccgaagaccacgtcatttgagcgcatgcttactactgcattgactttcttatcacgaatcaggtactgtactgtattagtacacatgaaatctgacataccatctttattgtagtcaaattgcatggatggacgagtataaatcatgataccacgtcgagaatcaggattttgaccaagttcagctaaacacatatcatactgggcatagttatcttctgaccaaatagcccaaccataattcgagttaatttcgcctttagaagatgctacctgctgccaaatctttggtgtttcgcctggaatatctttaacaaacaagctcttagatttataccattcaagttcacgctgaatgtattcatcattaagagcgccaaaaataaagggttcatctgctacaaatgatgcgccaataatttcaatagttttaacgccagttttatcaactacgaaatctttttcctttaatgcagttcccaaataaaaacggatttcttcaactgtcatagagtcattaatcatttaaacctcaattgatacattcatatttaacttgtaacagtaataaaccccaacctaaaataatagtcggaatcataagaggaaccgttacactatagtatatacttattataatcatcaagattaaaagcaacacttctataattttgcttttcattccttctctctgatgataattacttgatttggctgtgcagactttttagtttcacccgcaattgaccaaataaatgtaataaaccaaccaataattgaccagttaaacagcaaagacgtgaaaaagattcctactgtcgattttgacccacgcatcaaggcgataaaccatggaagcatgtatataataatagccaacacacctgaaactaaaaccataaaaattgaacctgctactaaagtttccatgttttcctcacttagtcaaattttttacgcatgaattataagaattcactacatactccatcggagcatttttaccggtacgccattggtaattattagcccaatttgcccaaagctcggcgcagtagttttcaattttttcttcgcgtgtaattacatccgaattacgatatgcttgagcagattcatctggacgaatagcttcgtcaaaatttgcctgcatttgttctactgtttgctttggagcttctttataacacttgacattaggattataaaacttgcttgaacagtttacaatttttcctacatcagactgatttactaccggtccttgagctacacaaccagtaagacctaatgcaataaccaaaatagcgattttcataataatttcctcaaatgcaagtagtaattactccagtagtgcttatgcaggtattacccatttgcacacctaaagatccatttgtattcacatgaagattatcatcaattttaactgatattttaccattagtgtgaataacggtgctagattcaatcacaggttgagtatcattttcaacactaacaaatggaactgctgctaatgcaactaaacaaactgctaagcatcccataacaattttcattttattctccaaatccgtattagttgatagttgtatagtaccatggaagaacagtcttgtaaacagttttgtgaaaattttttagggaattctaaaggtccagaatcatctgtttttcataagtatagatttatattacttgtatgaaaaagggacccggaggtccctagatttattctatcagccaaacaggaagtctaacgaagctttttcttcatagtccataccagccgattcacacatgcctgcaagcggtttaacaaacgatttttggaacaaagttgagtagtcaatccaagatagtacatcagaacgaatttcttttggaagttctgtacccgacggccaagcaatgcacttgtcgccaaatggatttccttcacgtaatggaagaaccattaccttatttccatccaaaattggagctacacccagaccactaacagctcgacgataagttagcacaccacgaatatggaacgggcatttaaatcctggccaacctttatcatcatatttcgctatatcgttcgcagtttttacttcagcaataactttatagtcaagttgacgatattctttctcgaagttcttgtaatattcttggacagactcttcaccttcctgaagaatacgacgaatactttcttcaagagcttcttgaactgctttaggcgttgaactttgctgagtttccatacccatgatttttagatgcggttcagcaaaacgcttatcttccatatcatatacgttcagagcataacgctttttcgctttccaaaatccaccaacgccctttgaaccaagtggagggcaagaaatagcttcacggtccatatgcatcagatgctcgcggttattcatataatcacataactcacgatatgcaacatcaatcataggttccatctttttcttaccgaactgattcatgaattcaactaaatcgttctgctctttgaatcggtcaagaccaactttttcaataactttatctacacaaacatataccgaatcagtatcacctgctgcaatgaaatcttcgccattagttccgcacactttattcagatactcattaattttacgagcaatccactgaataccaacttggccgaaaattgtgatagcagtagcatttcgcaaatcatagtaacggaaatgaatattaccaagagcaccgtaaaggctgttaataagaattttacggttcagctgatttgtattagcaagtgtagccgctttttcacattcttcaatcaaactattgagaacagattcagtataattcgatagttcatttaagaaatcatcactgaacttaacatatcgttcaacttcaggtttagttgaacaagaccctgcgcctttcataataatctttttaatagcttcggcattcatttcttcagcgaacattttctttttccaatctttacgctggaaaaatactttagcgatttcctttggaatgataccttcttgatgcttatcatacatccatccattcggagaacaagaatattcatcactcggtttaggagctgttcctgcgatatattcatgaattggatgaactttaaactgcccacgaatagtctcaggactaatgttaacctgacgaataatgctcggatacagagacgtcaagtcaaaactcataatatatcgacgagcaattggtttaggttcaaacacaaatgcacccggaaaactctgtttaacatgcgaaccttgttgaggaataaccttatgttcacctttcaatgagttaaaaataatagcatcccaggttttaataggactcattacaccggaaaaaggcattttagcgtaataagacatacttaaaactagatcgataaacccgcgaattttatcaattgcttgaactgattctacgtcaatgatgttataactaatgtatcgttgatgattagtctcacgaagtttattaataggaccgtcgtatggtaatttaccttttttggtttcatgttgagcaactgattccaaagagaatgacggcaaattagtaaaagcgaatttcttgtacaaatctaaataatcaagaatagatacgccatcaatagaataaatttctttgctaccgtacatattttgaattaatttagattttactcgaccgattggagagaagcgtttcatactacgttcaccgagaaccattttaacgcgattcatgatatacggaacgtcaaatccctcaatattccaaccggtaaaaatagcaggtcgtttctgttcccaaagattaatatattccatgagcatatcacgctcattatcgaatggcatataaattactcggtcaagaatttcttgaggaacttcatcaccaccttcacagtcaagcttagcagctaactttgcatcccattttgatactgaaccatacattgaattcaaaaggtcgaaaacataaaaacgatcatcaattgaatcgtaatgagtgatagcatcaatttcatattcagctttcattgggtcaggaaatttatcaccagtaacctcaatgtcacagttagctacacgaacaaattttcggtcataaacaatttctgaaccgtatgtatcactgatataagcgagtttaaaatcgttcataccgagagcttcgagaccgatgtcttccattcgtttcatccaatctcgagcatctttcattgatggaaatttttgaggagcgcaatttttaccatagatgtctttgtactttgactcttccttacaatgcctaaacatagtcggaagatattctacttcacgagtacgttcctttccgttttcatcaatataacgttcaacaatgttatttccgactgtttcgatagagatataaaattctttcatagatattccttagtttatagcccgagttattaggctcttgatatattatactccaaataaggggccgaagccccttgcttaattaccaatcgtatatttaggaacgagtttccattcatgtttttgtttaaaagaaataactcggaagttattagttaaatctttcataaaagttctttgaccaggaacgatttcaatcagtccccaatcttctaacaaccatgcaatcgaatcacgacgaacttcatcttcttctgtcatttcaacttgacggccatccatacgaagcatttctttaaaatgaacgatatagtatagtccttttttctgaagaatatgacaggactgatacagaactttatctttattattagcaattcccatacgagtcaaagtttcttttactttcagaaaatcttcaggttttttaagagtaatttcaatcattttaccattccaatgctagttttttgagttgtttctgttcttttacgttcttagtcacttctttcaaaaaatcatccgtgactaatcctttaagttcttttaatactaaaggtagttttccatttttagtaagaattgatttatagttaattgcatcatttgtattaacttgataacgcttagcaagtaacttaataatcaatacttcggtggaatcttcaactagttttgcccatttaccatatcttttaccacgaggaactgcagccattagataattaaaatgagcttcatcacttaatccagaaccgattaaattcatagcatatacagctggcatgcactctggaaattgtgataatgcattttcaaccatgaattttgaataatctttttgagcaatagagcatttagttttattattaatagctccaattatttcaaaaaactcattttcagctttttctttaaaagaatcagcagcggattggacagctgtccaatcttttgaataccaagcaacttgatgctcgtttaattgaatatcatcttcaaataagctcatatcacttccactgcatttcacatgctaactgaatgaaaagataagctaaatgcaattcagtattagctgcaataccatgatactgattattttcgccgacaatttcgtacatacgaataatactctgtggagttacacgtgaatagatttcttcggcaagtttacccacgaaccacgaataatcggctgcatattttggtgctaaagctctgagttgtttaacatctttatttttgagagactcaagaacatcatcaatagcaccacgatcgttagtaaccagtgataaaataccagcatccaaaacacctttagatgaataactatcgagctcgccaatagttttacgaaaatcaggaaaattctttttaaccaaagctgctacaactttcatatcagctatagcaattccttcatgtttacagatttcagtcaatcgacgaatcatctgcttcatcatttcaattttatcttcatcggtcggttgaccgaacgtaataactcggcagcgtgactgaagcggtttaataataccatcaatattgttagcagtaataataatactacagtttgaactataagcttccataaaggaacgaagatgtcgctgagactctgctaatcctgagcggtcaaattcatcaataacgattactttttgacgaccatcaaatgaagcggcgctggcaaaattagtcaaaggaccacgaacgaaatcaattttacaatctgatccattcacaaacatcatatcagcatttacatcatgacacaatgcttttgctacagttgttttacctgttcctggagaaggagaatgaagaataatatgtggaatcttacctttacttgtaatagatttaaaggtttctttatcaaaggcgggaagaatacattcatcgatagtagatggacgatatttctgttcaagaatgtgttctttttcatttacggtaatcataatttcctcattcaagttttagtgtaaattataaagggccgaagccctctattaaaaatcgtgggtagaatcagcttcaagagctactacataattcgcgtgttcaccttcaaatttagcagcaccttgtttaccttttgcccagagcagaagtttataatttcctggttgcattttcatatttgtcatattgataatgaaattaaatgtattttcaccatcataatcaccaagagtcaaagaatatttaacacgggtaagagcagaatcttctactttattaaaaccgttaattacgattttaccttcttttactgtgatagcaattgtatcaatctgcagaccacgagatacacgcaacagttgttgaaggtcttcagctttaatttcagtaacaacagatgctaccgggaatggaattggtttattaggagcaactactgtactcggatcggctgctggccaaaaaattgttgaacgggcatcagcaattttaatattaccatcttctgactgggaaatttctgcatcgtcattaactagagacagaataccgagaaaaccgttcaaatcgtaaatcgctacatcaaaatcaatagtgtcagaaatatttgcttccgcataagttgtaccattaactgcgcgagtcataataaattgaccggatttaagcataataccagagttaatagtagcgaaatttttaagcagagcagtagtatctttagacagtttcatgtaatttccttcaattcaaatgagatttaattttataactaatttaataaagcaattaacgattaaaatcagccgcaattgtttccgcaacaatttgtgcagcaacaattaggcgttcatctgcattaccgcaataatcatcttcaaggcgttcaccacatgaagtcataataaatttagcaccggcgtttagagattctgtagtatgtttgcgcattagttcaatccatttattacttacttcacgatcgatagcttcataatacgcatgacgagcaggtgcagatttaattttgttctgaataacttccattgcgttatcagaaagagacaaaacccatgctcgacggattttattttggttttgtggatttgattcagaacgcacgtgttttggctgaatatcttttacatcaacagtataattcacagtaattttagtcataatacacctttagtcataataatcagtaacagtccaagcttcatttctattggacattatttttgtatattctgctttaaatgcattcctaagcatatattcagtaactatatgctcttcattagaaaaattatttctcagaatatatcgttttatttcaggaatagttaatagatgctgtccagttgaatattccatgtttttcctccatagagattatactctaataaattaaagcataatctcttataaattaaaccattacagtaaatcgaccaactttcttcatttgaagatgctgaccatattcttgtgggtcatggtctttatgtgaaattataaagacattagtgtttttcattgaatttataatattagctacacctttaataccttcggcatcaaatgacccgtcaaacacttcatcgagtattaatgtactaatactaacaccagatacaatagaagcaatatcacgccaagtaaataaaagagcaatatcaattcgcgctttttcaccttcactaaatgaagcataactaaaatcttcacgaccacgggatttaattgtctcattaaattcttcatctaatgtaaacacataatccgcttccattattttaagataatggttaatctgtttattaaataatggaatgtactttttaataatagcacctttaataccagaatctttgagcatgtcagtcaaaattcctctgtggtatttttccattactaaattagtttttgtcttaacaattttatcaagttcttcttgaagcagtgctatttcatcagcatggtcaataaactcagaagatgctttttctatagctgctttaacttttttagctttatctaccgtcgtgattagagattgctttttattgcgaatatcatttgccaacgactgctgagttttaatattatctcggtattcatcaacaagaacttttaaattatcacggtgtgttgaaagctgttcaaacgaatgcgtacattcagaaactttatctttaattttagaaacaactttatcaccggaacttaattgtgacaagcaggttggacataatccaccttcgtgatacatattaatgactttattatacgagtcaatttttgatttaattaaaaatgcttcttgaccgattttattaaatgcatcagtcgggtcttcatctaaaacaatattaactaatctttcattagcttcttctatttccgattttagcgttctagcttcttttgccaaatcatcatacatattttgtagacgagtaaggttgtcacccgttaattttttctggcgttcaacgttatcattatatattttaatttgttggataatactatcttttttaacatcaagcacttggttttgtgaatttaattcacgtattagtgctttattaagcttatccatttcagctaatgttcctacctcaagcaggtcttccacaagctttcttcgcgcaggggtcgacaaacccatgaaaggggtataccctgctgtaccaaggacaacaatctgcttgaaactggcatatgacattccgataagctgttcaaattctgcttggaaatctttactgctggcagattcattaagacgtgtaccgttaacggtgatttcgaaaacgtttggtttttgtcctcttttgatatagtactttttctcatcatattccatccacagttcaactaaaagttctttcttatttgtgctgtttattaattgacctttctttacatcacgaaatggcttgccaaaaagcccaaacgtgatggcttctaacatagtagacttaccaccgccatttcgtccagtaataagagttttttgaaccttatctaattgaatgtcaataggatttccacctactgacattatattttgatacctaactcggtttagtttaaaattcttcacaaaagattccttttaatgtatcttttagaccattctatcatatcatcataatctaaaaagtattcatcaaattcagccacgcaaacaacaccttgtgttgtttttgatgtaatataaattattccaacatatctagaatcttcttcggtataatcaatatttgctatgaattcatcattaatgtcaaatgtcgaaaacttcacagtatgcatccttaatacaagatacagccatatctcgcaatgatttaggtgtgtcattatctaaaatgttgaagttaaaagatacagcccagtcagtgcagactgtaacctttttaatacaattatcttcaacctctagcggttcaaaccaatattcaataatttctttatgaccaatatcatcttttacttcgcattcaaaatgctgactcatcataacatttttaaattcatcaaaagtcattgtgttgcctctacatataactgatttgcatattgaataagtgcttcacgatcagaatcagtgatgtctggaattgcattaatgtattcttccatcaacgtctgaagagattgaacttcaacttcttcactgtcatctgactcgacagagttatcaatctttgacacaactcgtaatgaatgcacaactttttctagttcagattcgaacttcgtcagatttttgtctacttcagttactataacacgtactgatagatttgtaaaatctttatagtcaatttttcctttaaatggataatgaattctacggtgccaggtagtattgtttggaataaattccattcgttctgtttctgtatcaaacatccagaacccacgagggtcattctcgtcacctgcagttagtgtccatggtgtcccaatatatctgacgttagcagcctcagagatagtatggaagtgaccagaccacacctctttataagtcttaaggaaatcaggttcaagaccgtgagatttcattcctttataaaaataaaatccattcagctcccagtgaccaacacaaaaagaagcagatgaagttttgatgtgttcaagaatttcaccagtattttcttcgcacatccaaggaattaaatcaatcaaacacccgtcaaaatctactgtagtaggcttatcatatactttaacattaggatatttagccaaaagctcagtagaggcatttggatgcattacatttttgtagtggagatcgtgatttcctacaatagtatgtaatgtgattccagcgtcatcaagcatttgaactatttcgcgagcgaactccatagttttatgcgtgattgcttttcgcacatcaaaaatatcgccgtattgaatccatgtagtaattccatttttcttagaatattctattgcttgtttaattccatcaatttgaataccgcgaatccactcatcatcagctttaacgcctaaatgccaatcacctaaatttaaaattttcatatatcaagaaccgtcattgaaatgcaaaataaaattattgaaataaatccatctggagtgctaaagaacccaatccaacatgctctagtgaatagataaaatgcaagaaaaagtatcacatatccaagaaatatcattatatcaaactccgtataaagctaaagggccgaagccctttattttgtaataatgtcaaattgctctttaaagcagaagcttgaatcttgatgctgatacaaaaattcatacgctttttctcgctcacggtcataaagagctcggtcagatgacagttctttaatacgctcgaatgttgattccatatcattttcatcaaaccaaatgataccgctatcatgcgaaattagcggagtattatcaacacggaattttaaattttcgccagtagatttccaaaataccggaattgttccacatgcaccaagctcgagatgagtatattctaaagaacgttgtagatattttttatccaacttactcaactgataaccaaaaccggatttactcatacgttcaagcatttcgctatttacataacggtcaagaatttgcgttggcaaattaggagcaattttaatttggtctacttgatgaagacgataatactcgtatggaattcctttttctttaataggaatgaacgctggagaacgttccagaccttccataatagtacttagtcctgcaggtttaagatgtttttcatgaaaatcaaacatctgataaaaacctttccatgtagtcgtacgaccaatccaacggttgatattcatgttaatttcagaaacatctttccagtaagttgaccgaaccttcgcaatatccataggaggctgaaagttatatactgtcggtgcttcttcaatatcatcaaacagagaaacagtttctggataccattctttcatcagaactttattaaaatcaccattatcagaatggctaaaaataacatcagctcgacgaacagtttcttctaatcccaaatttcgacgcaaagaaagagaagaatggtcatgctgataaactacaacacgaaccgaaggtttaatgttatcaataatttttttatagttattaatagtgtcttcttcaaccgaagtagcaggaactgaattgataattagaatatcacaatcatttaccagcttaagtgttttatcatattcttttgccaataaaaccggaattgaaaatgatttataatcatgcgcgcaattacgagtaaatgatttatctttagcataaaccaaagttacttcatgaccatttttaataaaccaatcacgttgctcgagtgagaattttgttacaccacaaccttcaagacctcgagccataaaaatacatactttcatttaatatcctctttgttttggtttattttaccaaaaatttataaagcaatataggagccgaagctcctatccacataatacgccatacagaggctcattagaacttttaaattttatgcgcttatatgttatagttccttctgctttagctttatcatgagactctttaaagcgtctcatcatttcctctttagaggaacgaattttattataatctatttcagaagtctgggtgttcatctttcataattgccaccattttttgacttgataagaatcaacccacactttcatattagggtctgctcttacaataggaggattaacttctttaattgaactatcatggtattctttttcagaaattttcacacaaagatgaccattcaaagattcagtaaatcctgcattaattttaagacgcttgaattttacgtgtgtaagcatcaatcatatcctcaatctgcgatctagtagtcttccaaagaatactgatgagttcatcgttatatggctgttttagaatatcccgacttttcttgatagcatattcgtattgagcaaaattattattttcagctgcaatctgagcgtgcttataaagacgattcagttcgcgtttgtttttagacaataacttatttgcttttctttctgcttcaagacggttcttttcttcaatagaagaaataagcttttccacttcatcattaatttcgggtttatcagtcatattatttctctaatataaaataaaaatcatcatctgttaaatgataccgatagtttaattctacaccattagatttaaaagcggtatcatacggattttctggatcaatatcaatgtcaagagctaaaacttccctgagatacattttaagtaaatagggaatagcttcaacttcaggtatttcttccaagaatccggagaggttaatcgttagcctcatataaaaaatccaaactaggagaatcgtctacaacacttttcttttcagcccccggtgttctataggttgattcttcgtaatgcgtcattttatcgtagatgtcttgaataaaagtttcatccactaacgcaaccatatcgtcgtcacgactgtcatagacattgtgaacgaagtaactatatttctttgcaacttccttacgttcttttttaatacgctggacaaatgcattaaaacaagcttgagttatatacgcatgtgggtttttatatttcgtttcatcaaaattatgaagccccttaatagaagcttctataccatctgcaatcatttcttgtttccaagactgggtgtatcctgaaaagttgaaacgtttagataagccttctgcaataagcataatggctaatccgatagtatcattctgacgaactactttatttgggtctttattatttgctaattctgttttccaatcaataatagcttgtaaaagctctttattgtttacgtaattatatttaggcttagtttctgacattttcacctcttagctcaattcatagatctattatatcataatatttgaagatctatcttaaagcatagaggatatcagttatctaagtaaacagtatgcttggaatactttttccatcatctttttaaattcatgaatatctatataatgactagttagatcagcatgatataaaaagtctaaaaacttttcatgtgtactaacatattcactttcatttaattcagaaacatggctttcccaatatccaacaccagtcttatttgggaaaaatgaaattttcatgtattggtcaacatagaaaatgccataattttcaatagtaatagaaatattaataaatttcatacattcatcaacttagccgcttcaagagctgcatctagtgaatcaaattggtcaacgtattcaatcaattcgccataattggcatataaccaccattggctaaattcatactcaaggatgaatccgtttccttcaatttgagttaaaccaatgccatttgtatttacttcatatccagcaagacgcaaatcgttaataagagcttcgttcataattataccttagtaattttcaggtctgcaaattttttcttgcgttgatttttcatgcgacgaatagttttatcggaaatttcatgcttttgataagctttagattctacaccaaaagctttaacatcaaattctgacaagatatattgaaccaacaattcacggacagtattgcgtccaatcttctgatcattctgtttcatcgtttgatgaagctctttttcccatttatccaaactttgaggagttacaatatcgcctttttctagcaaagaaactactttatcatatgcgtaagaattaatgacgtttttaatttgaatagtcatacattatcctcaattacgttaaaattttattatccaaaaagggccgaagcccttagctaaactttttggcacccttccagccttcgtacatcattgcggctgatattaatattgctcctgagcaacttgaatatttgtgattccaaaaccagtttagaaaaacttcatcatcaataccttgtgctatcatattttcaaagaactgacgacgagcttcggcaattcgttgcgataatttagattcaggattcatttaaatttcccaattaccattttcatcaatgaatttaatccagtcatttactgaccacttagttgtatcgccttttggagtaacatttaaagtgtataacccctgcttaaaaagcattcgtttgatattcatattttcctcagctgtaacgataacactcgtttgatttacgtttagcaactcgttgagaagtattataatcaaaatcatcgtcaatgtaaactgattttttcaactttcttacttcaccacgtaattggcgatttagctcatctttaacttctgaatcaatacctttcattctacgccatttatctgagcgaaaaatgttttcaaccatatctttatgacttaccccatcaggagctttacgctttccgaaatagtcataatcacgcacttttaagtctttacgacgatacgttttacccatggagtttaatttccttagcaactgaactaaatgcagcacgatcgcaaatcatgcgtttatgtaacttgagtataatatagcaaacttcaaaactatttacatgagtaacacgaacagcattaccattaatgagataatactgtccctttttaatttctttatcaaccataaccatatcaattcctcaaaggtaattcatatgttaataataccacagtttgaacttcttgtaaacaactttgtgaaattattttagggaacgataagaagggaacgatagcttagaatggtaatatacagaatgcgagaaagaaaggcccagagggcccgtcttagtcttctatgatatctctatcatatccaagtgaaatgagagtttctttgaagtgtttaatgttcttttgtctagaatcattgatgaaaatgactggataacgaatattaagagatgtgaatccagcgcgtttagcaagagatacaatcagtggacgatcatactcaatcttaccattatttgtaagaactttataaaaagtaaaaggagcattgagctcctttagaagttttgtaactgattgacatccaggacaacgacctacttcatctggaattccatagacttcaatcttattctttaagttcgagttttgttccacgagaaataattccttggtaagcccaataaggaggattaacagaatcctcaccagagttttcttcaggaaaataaacctggataacgaagccggattcatcaaaggtgaaataagtagtaggcagttcacctaacaaatcggcacgagcgttgatttcttcgaggtcttgttcacgtccagcccagaagcttgggttcagactacattcatagaaataatagtcattaccgaacatatcaaaaccattccaactctctactacataccgctcaaaactaatcataattaagcctttttatcaagaaccgcattcagcttgttagtaattttatccagacgctcattgaactcactagaagataagcccttttctggagaaattaaactaatcacgaaaaatatagcaataaaaggaataagaaaaatagctccaactgccataaacagaaagaacgttacagttgtaagaaaatcagctaaacctttacgaaatttatacatattttacccttaattgattaaccaagcattgataagcactaaactatattgcgaataaaattctggaccaaaatgaaaaatcatatcatttatagtatccataatgtaattcaatttaatcatgtgtccacaccccatcggtatttgaccaaagtcgctgattatctgatcctcgccacagctttttagtcggaagatttttctcatacttcccatcaataataacatcaacatatttaagcatttctagttgtttaatatcttcaaacttatatcctgtccacaaccaaatgcttttattgggataaagatttttaatagtttgaaccacagagtgaatcacgtctctgttatcaggataaagagggtcacctccggttatagttaatccttctatataatcattattcaaacattcaatcaattgttctagtgtttcaccagtgaatggaataccatttctagcattccatgttgatttattataacacccttcgcatttatgcaaacaacctgtaacgaaaagaacgaccctgcaaccagggccattaacaaaatcgcaaggataaaatctatcataattcattggtgtttaaccctatgcatgatttctttatttttgccaagattaaatccgcgttcgttcggatttcccaaataaccacatgttcttcttatggtattcatctttttaggatcagtttctccacaaatagaacaaacaaatccgttttcagtaggagtcatttcatgggtacttccacatgtaaaacatttatctactggcatattaacaccaaaataatctaaatgttgtgcagcataatcccatacggcctcaagaccttttaagttatttttcatatcaggaagttcaacataagaaatgtgaccacctgtcgcaatgaaatgatatggcgcttcacgagaaatcttttcaaacggagtaatattttcttctactgaaacatggaaactgttagtgtaccagcctttatcagtgacatcctttacacttccatatttttctgtatcaagtttacagaagcgataacaaaggttttcagcaggagtcgaatataaactaaaagcaaatccagttctttcagtccactgtttaagatgagcattcattttagttaaaatttctcgtccaatatcacgaccgacaagaatattcaattcgtgaataccaatgtatcctaaagacactgaacttctaccgtttttaaataactcaattatgtcgtcatcaggtttaagacgaaccccgaatgcaccttcttggtaaagaataggagcaacagttgctttaactccttttaaggaactaattctacacatcaaagcttcaaaacataaatccattcgttcattgaacaattcaacaaatttctgttcattgaactgtgttccaatataagaatctaacgcgatgcgaggaagattcaatgttacaacaccaagattattacgtccatcaagaatttcattgccagtcgaatctttccatacgctcaagaaactacggcatcccatcggagaaacaggaacagatgaaccagtgatagctttattgttcttagctgaaataatatcaggatacatccttttgcttgcacactctagagcaagctgcttaatatcatagttcggatcgtctttataaagattaacaccttcttcaacgaacataacaagcttaggaaaaataggagttatcccatcacgaccgagacctttaatacgatttttcagaattgctttctgaatcattcgttcagtccagtcagttcccgtaccaaatgtaattgttacaaaaggtgtttgcccgtttgaactaaagagagtatttacttcatattcataagcttggaatgcatcgtatacgtctttttctgttttagattgagcataatttaacgcatcggcgatttgccatttttctgcatcctcaatatgttttgcataggtgcgtttaacataaggagaaagtactttatctacattcgcaaaagtcgttccgccgtattggtgagaagcaacctgtgcagtaatttgtgccataattgcagtagcaacaccgattgatttaggagtttcaatctgcgcattaccaagcttaaatccgttctcaagcattccttttaaatctactaaacaacaattagtaaatggaagagcaggggaataatcaatatcgtggaaatggataattccgctttcatgtgctttcataataaaagacgggaccatatttttggcaatgtgtttagacacaataccagccataaggtcccgttgagttggaaaaacacgagaatctttattagcattctcgtttaaaaggtctttattagttttatgaatcaatccttcaatttctttttcaattgtcattttaaactctttctaagctgcttcttaaatgaagctattaattgtgttttagtgtcagattcattatattcaaatcctctttgaagcatctcagccatcatttcctcttttcctaaacgagaaaattcctttgatttatctccaacaaagttagggtgaatattattttgggtgtaatcggattttaaataagtaagtaaattttctaaccattcaagataatcaacaccttgcccctttaagccagaacgattaaatttatgtttcatttgaccttctgcggcattgcagagattacaaagcaatccacgtacctttcctgcttttggtccatttaattcatggtcatggtcgaggtgattagcttgaacgtcaggatttagttctcgttggcaaattaagcatttaccattttgtgcatcataaaatttctgtttttcttctttatataatttgccagtcaataacataataaaacccttaccttaaatagataagggtatttattattttcaagtattgtaaaacatttgattcaatcgcttatattgccgaatcttttggtcagaaaaagaaatttgggtttcaagccattcaatatattctgccgcagcttgcatcaaatttccttcatagccatcgttattttcttgtgcagctaatttagctaatgcgtatgaaatacgttcaccttgaaaatcggctttaggcttctgaacaacttgattagttctatctacaacttcttcaatttcgccattttctactgattcagtattccacaagcaccaatacgtaattggcttatcgtagatgttaataatctttccatcagaaagttcaatttcaataattccagtatcaggctctatatcatcttcacattcttttgcaagttcacgaactttaaagacagtacctgcactaagttccggccagtaattacacagccctgtatcagcacgattaattctaaaccacttatctactgtaatcatgtcccatctccatatcaattaagtcatttatcgttggttcattatatactgtttcttcatcagtgtaaaccggttcttccggctctggctctacagtttcccatctagccgcccaccaaggttttatagcgtaatccattctcgtactgtctgagttactacacgttcatggggctcgactagttcaacagtcggaactgcataataccagtcagaatgataagaacctgaccgagattcatttacagccacatgtacattatgttttggactaaagtaaacacactgacgatattgacatttaccatcttgcacccagtcttctatttcgacaggtttaagataatcggaaaaatcgaaatcatagttttccgaaaatgcatcatggtcttcaatgatttcgctcagaactgcatcaacatctaatttattttcaatagtcatttttcaccaattaatttcgcaatttattaagttcttcatcatcaatccaggattctagtcctgatggcaggtcacattcaatttcccaaagaagttcttcaattttctgaagacgatctagttcttcggctggaatagtaaccattgacggagctcgtgatacattaatatcgtaaatcatatttaccccaatttaaccatacaatcgccgtatttccacttagaaatagacttttcaccattagaataataaacttcgagtttagcacgattatttttaatttgaataaccttggctgtcatcaaagttccatacccataataaactgcaacttcatcacctacatataccgcgcttccgcggtaatcatgaatatagtcatttccttcgagcatcatttaaaatattctcgcagctggtcaaatccaccaatatgacttccatcaggagcaaatacctggggcattgtcaagccgatttgagtatcacgacctagtttagtcagaagctcagcgattttctcatcatcaaaaacacctttttccggcataatgttgataaattcaaacggctgtttcttcacggtcaaaagacgttttgcattatcgcaatacacacatttatgaatgttgctatcataaccatatactttaaacatattattccttaattcctaatacttgtttaaaagtctcgtcgtaatcaagactttggcccgtttgttctttatgtttgtatataatatcacttacttctgatagcatatttttatatgaacgagttaaagcagatttaagcacgctgtatctatcaggaaatttaccatgttcattataataagctattgctaattcacggactgccttttcagcagcctccatatattctttacgcttggtcatttttaatccaaaatattattaggcattggttgaacactcacaagttctttaaagaactcagtagagtcaggcaatttaaccatttccggagcatgcttactgaatttatgtttacattgacggcatttatattcaagctctggtttacgccagttaatcaattgaacttgttcagtaccgcattcagggcaattaggaacgtttttagaagctctttcacgtcgttcaaccatagccataatagcatcccatgctggaggtttaaaatctaaatcgtcgcagccgtgaatctttccacgcatttccatatcatcttcctcaccagccataataattttaattaaactggaattacttgaagctgcaatgtcttctaataaacgctttttcatttcaatacctcaatagcattacgtaaaccatttgcttttgcattaagagcttttaacaatttggtgtgttctgcaatttgggcttcaacttcaatcaaacgggcattgagatattcacgttcttcactcagattatcaaccttttctactttaggctcttttacaactgtcttatatgtattagggttcttcagtttaattagaatgcgtgaactgtataacattgaaccattatcttcggtttcgtcatacatttccactacgtccataatttttaacatcatgcggagtttataagacaacgaacgaatagttttgttgtgcttattaatttctttagctgtcatggtgccaagattacgtgagtaataataaggaacctggatattaattaatactgatgaaccacctggcttgtgtgttacttcatcagcaataacccagtccttaacatgaactgtatttgtacggtcatcgcccgcggtaaatagtttgcgagcatgcttaaaaagcatattcacttggtcattgaattgacaagcaaatttatcagcaaatttagtttcaggaatggtagaaaaccaatcagccaaatgagtctttttaacatcattaacaatagtaaattcaaccaaatcggttatagatgtctcagatttaatgaagctcggcttcataaagtttttaatgttctcatgagctacagtagaagataacatacgagaacgtttaaaccattcaagcaaattgcctaacgaatgagaataagcgttttgagtatctttacagatatgattttcctgaccaacatattgaaggaaatcacgaagaatattattgattactgctctgtgcccgatctgataattacggtgtttagtaataagactgtcaaaataatcaatataatgtttacgagttttcatattcttctcacttggttaatggtttatactccgagccatccttggctttaaattacttaattaactgtaaagcttgttcaagacgatcaagacgattaacggattcttcccaaatctttttagcctgctcatattctttctgcgctttattagaaatttctagaacttctttataagctttttctaatgcaataacttctggacgaatttctaccggttcaggtgaatcatcaagacattccattagttcctcaagggtagtttcttctttaggagtattcacaatttcatcacatttttgttggtaaatttctttactagtaggtgaataagcacatttcacttcacgaagactaattacaattttatatccttcccatccgcatatattcttaaaaggatatgtatgaatattttctactgtttccatacaaagtaatgcagtctctaactgacgagttatagtgctagcaattgagaaaaatttattaatgttcttttggttagtttctggtgtaaaaaatccataattcacaaaaatagctactttatttttatcaagctcatattcttttatgataatcatatcagaagccaaaggatgaatttgacgataatcgccatagcataatttagaagctgattttaaaatttgctttttgaaaagtctgaaattactaatccaacgacgagtaaaaatattctcagggtcttctttattattaagatgataagaattaacatcaccgaaccaattatatcctactacatctttagttcgtttaatttctttcccaaaattaccaagaatatcccgattaaccaaatatgaaagaagacgagactctttaaaggttttcttgataacatctttatctacacggctagaaattttacgaatttcatgaataaatttagtagaagaaacaatacttgcatcaacactattgagccattgattgataatagaaagaacgatattttgaccaaacatcggtatagctttatcatcaataacgctattgaatgatttgatatattcgttacgagtcatattaatctcctcagtagaaagtaagaacattataccacatccttgtggcaaagtaaactagttcagtgcatttagtgcattgttcagtttagaacgttgcttcgtgagatttttgactttttcttgtgctttttctagcatcttttcagcttctaacacttcattggtcgctttaacgagttcatcatctactgccttaagggacttctcaatcgcatccgcgtgccatttttcaacaggtttaagactcggattttcaataggaagaaaattcactttattgaatttccatgcatctttattacctgaactatacatccaaaatttaggatcatttgacgagtaattagataaatttaagttatcttgcacttcctgctttttctcttgcgggacttcgtcctttctcaaaaaatcgtatttaaatgaaacgatcatatcaagttcatatgttgtcgtatctaatttaaatcgttcgaaatgctgcgaaatcttagattgaacagcagcaacaacatccatatacttaaatgcttctgtcagctgtgatttaagacattcacaaattgaaagagaattttttgtattaggtttaaagctaattcgtgcagttctattattttcttttaatggtcttacttccatctgaagagtataaccatcaaatttcaggttctttaagttaatatcagaaccttttaatcgactagccgtcgacaaaatttgctttaattgtttacggaatagagcaataaatctccattcaatacgataatgatttggattgaaaaatccagatgataaatcgaccttactctgaccaacaccttgaacaaatagaggatttttataatcaatagttttacagaaatcggtgagctgctcacgagcagtccatttgagtaatataccctgcttcattaaaatgacgtaaccattcactgctattcatatatttaaagtgaatatcacgattaactttatcagggtctaaattattttgacacaaaaatgtcataacatcacgagtatagctggcattacgaaccatatcttcaatttgagaacgagttttcatggtgttccttaagatttaagtaaatcgacaattttaattaacttttcacgctcagatttagctttactactcaatccagatagtctgaaaatttcatcgtcataatgttgaatagaaatattcagctcttcaatttgcttattaaaataatcaatttgttcagaatgtttttcgttactacgaactggtacaggttttgtaggcaatttagttaaactggattcatccgggcgataaattaaaatgcaatttgaaccaatcgggcatttagcaccagatgaatattctaacgttccagcttcttttaaaacttcaaaagctaaacagagatgatgccccatattaacataatctgtagagcgagctctgacgtaataatcatcgccgcgaatactaaatttaaagcatttaaggtcttctgtattattggtcttaaaaatcatttgtttatctagacctttagctaatcgagcgcctaatgctaataatcgtcgttgattttcccacaaatctgcgatcatttggtcaaatgataatttcggcattagtcgaccgtaaagatcatagcctttattataattgcgaagaatttcacttgcattaatacgagacaatgctccaattttattaagggctttcataatgcgattagataaacccattccagacccgtttgttcgctgtaaatgtttttctaatccaaatccaatatcaactttaaacttatctaaaatttctgcatgaacatctctgtcaataacattcaaatccaaagttgggttaaatctatgaaaaaatttatctggctctccacgacgaagtacagtccattcattcaattttttattaactaaagatttaattactgcattgacattattaattactactgacatattttcctcactcaatttcaattttactaaatatacagaatatgatggaaaagactatataagcaccgcatacagattgaactaataccattccaaagaaccaaacaatattatcaaacaatgtctgttttacgtcgaaaggacgtaaacttacagtaatattatcgcctttttctattgatgaatacatctctggggaaatatattcgctaaatctataaccgtctttgagttcatatacggcaataaacgataaactagacccctttccttgagttcctgtaagggtattaactacagtaacatcataatctttataatgcatataatcattaattgcgtaataaccatatgcaattactatacataaacaacatatcaataaattcaatcttttaattatcaactgtttcataataatctcaattaaaagggcttagaaccattataccatccttggtataaagcggttatgcgagtaccgtctttaaccgttcttcaaacttccgaagagtattctggcgttcagctctttgctttttgtaagtttcaatacgctctgaaatgagagtgtatcgttcatttactgattctttcataaaatcaggaatttcacgagaagctttaatctcgtcaaatttatcaataacagcttgctcttcagcaattaagttatcatacatcaaaatatctttcttgatgaactcaatatcttcttgagttacacgagataatttagatgctttatcctttttgtactgttcgttagtatcacgagaccagtgtaatgtacgatttttattcgtatttttgtaaatttctacaataccaatctcatcgataataacgatccaattccaacgagatttgtaaatttgtcctccatcaaccgtgatttcacctccaattgagatgtcattaaagaacttgctttgagcttcagatttaaatttaccatcattgtagtttaccaagttgaaaatatctttagcattcattttctgttcctccgtagttgatagttgtatagtaccacagaggaacggtcttgtaaacaactaaaagaaacttctttcacaattttttccactgaaccacgcgctcactgctttcttagtctcaggagcagtgttatccataaaccattcaaaggcagcctttttatgattctggagggcttctcgggctttaatctgctcacggtctattaacactaacatatgagcctttcttgtcaccaagggcttcttatgattttttgaatactcccaatcatttgtccatcgcatcgttgttgcgaactgaaatactgcttctttaattttagtttcataaatttcacgagcctttgagtataacatcattacctccatttaccagtttaattctagtcatctttttgatggcagtccatataatctatttctgaactgcctttttgtcatagaaggcctcttatgaattatttcagaagagtaacctcagcgatttcttcccaaccgtttttgtcggtcataataaagtcagcaagataaagcgcagtacgcagtgaaacattgcgtaaacgattaacattgactttcatccatgataatgctttataagtttcttcatcagaaagaccgcgcttttgcatcatgtcagttgaaagaataacatcttcaaccctaaccataatttcttcattagtgtgaacacccaaatccaaataaactgagcgggacactaatgcttgtaaatgtggagcaagtttagtaccacgatctaattcgcggtcaatgtcaacgtttgtgataaaaacaatcgttcctttaaattcaaactcacgctcaatgcctttttcttctaagtaagaagatgcggtgctccagcagactttacgggtctctccggtgtccagagcagctttcagaagattaagaatgtccatatcagagaaaacatccacatcatcaatcaaaaggacagaattctcttcacgattattccaaagctgctcataaagaccaataccagagattttaccattaatgcttttatactcaatgtatccaatatcatttgctttatttaaagctttatctaaagaatacgttttaccaatacctgctgctcccgagataattaatgaacgaatgtttccgttaataataccattcgtcatcattcccataacattaaatcttttattaatgcgggttttcatatcttcatacgattctttaacttcttcaacttttacaccatcatatgaaatgtctgatttgtaaacccaaacaccgcgacgcttaccgtcaatttcaacaaaaactttaccatctccttgtgcatctaccggagcattatctgggaaccattcacctaagagctcaaaagttccagagatttctttgccaaagtagatacccttattgatagttacagttttcattttattctcctttgatttgataggactactataacataatcctatcagtttgtatacttattttgacatttcttcgatgtcacgacgatacccgtcacgaacttcacgaagagcttcaaggccacacataggctcgataccagtaatgtgaacttgattaatctgatactctacatcttctaactgagcgaaaacataacgacgttcagctgcacaaccagatttagctttaccgaaacgtttattcaaagtagtcattttgtatctccaatttactcatttgttttgatagttgtatagtataccataaagctttatgcttgtaaacaactttgtgaaaaatttttgaaataaaaaagggagcccgaaggccccctatcatttataataacttcggtggttttcaagataaacctgttcgaggaaattattccaaaagctcatatctactgttttaggcataccattcttagaagcgtcagtagatgctgcttctacttgatcgaccacatcttccaaaaactcttgaactgttttaaatggatgtttacccaacttcacgtcgagaataaatggagcatcttggagtggataaaccaagtcaccagttttgtaaatttccaatagttgaagtccaccacgacaagcatgactcagagctttccagtcaataccttcattggcttcggccttacgagcacgttcaccatattcagcatctaatttgttcagtgactgcttaagctcaataagagaaagcgttgtctgatatttacgacccaatacagtatagaacgtttgtggacctgttttctcatgattatggaacacccattcacagaattcgttttctggaagacgatgcttaatatcttcaactttagtgcgacgctgcttaatagaaccatcttcttggtaatcaacccattgctcggggatttgattaactacttttaatacatcgcgtaatgcagccaaacgagaacccttgacaccgtatttagaagcttgcttgcggacatatcctaaataggatttcatgttagtcgtataaaaacgagaacggttgtcttgaataaacttccacacgtcaggcaaatcagatttaaccactagttcaggtggagtgtgaagcatatccaatgctacagtttcaccatctgctgctaatttaaagaaatatttaagactgtatagttcatggtcaatatcatctttagtgtttttagatgatgtgttgttagtgtttttactcatgtgctctttgacatttccgataagaatatcacgagcaggaggaacaaaaatttctttaaaatctacatcagattctggggtagaagttccataaagatgactaccaaaatagcttttcattactgttttcatcattcagccttatattcaataacaggacatactttagctttacgagcttttaaaaattcaacgataaccgatttcttgggttgaataggaggtaaacctttatacgccctatcaatattttctacgtgtaaagcataatcctttttccatttataatctttatatttttcacgcaaatgtgcaggaataacaaatgaaccgataataagtaaaacaaccaaaagtgcaagtataaatgccgatggaagaagagtccataaactaccgaaaataagccaacgttgtaggctttctgcacaaataattgttagccctacgagtatagcacatccaaaaatagaaacgaaaaatgtaggaatggcaatagaccaaaaatatgcgcatagtgtcttaggtcgttgccattcatcgttaaacaatttgaataatttatagtgccaagagttttcattaataatcataattatcctttcattgaaggcgtaacagttgttaaatacttaatcatagcttcagcttctgattttgataatgaaatttctccattgttttgacgaatagaaataaaatccggatgacggtcaccaccagcttttaaaacacacatataagtatcaacttcgccttcaatatttgaaatgattgaagcagttccacatgaatgcggtttttgataaatcaatacagcttttcttccgccatttgactgttcataaacttttaatacatcaaacaaatcagttcttttatcaatagctaaaatgttattttcatcttcaatgttaaatccttcggatacttcataaagtgtcacccataaatcgccaatatcaataacagcgttcacttttccatgactttcaagagcatgacaaattttcttgatttcgtcataactcattttaataatatcatctccttgaataagaaagatgtcatttttaaattcaacacgaattaaaccacttccacttgaaataaacatatttcctcactttgaaatcatagttggaatgacagaatcaagataagtctttagtgcaatagcttcgtctttggtaaatgtgacaatatgtgctcgagaatcatcaatttggcgaacaagtacgacatcgccatcttcataagaagtcttgacatccaaagtcgtagtataatttgcagctactggattaataatgctagcaccgcgatctttagcccattgaagtttagccttttcgggtgtttcgactgtttcagattccaagaattctttcaccttggcaacgaatgttgcccaattgttgatagaaagacacataaattcagtttcaatattaccgccgtaaaggccacgataaaaacgaacttggaggtcgcctgtaatattagttacaccggtaactcctgagggagcataagataaaatcgcagccagttccataggaagaatagtaatactatcgtcttcctgcgtcagaacgtatacattaccgcgtttttcgataactaggtcaccgaacaaatcagttgtttcaattacagctttcatattatttaccaattaaagtttcaatataagaatcaagatttactttagcttcttccataagagttttgtatttaatcttgttagcatgtccggagaaagctgattcatcaataattgttgatgtatgaacagctttactatacgtctcaattaattctcttaatttaaaagcctgctcacttgtcattacatactcctctgaatcatatcaataatgttgtttaccaaattataagtaaacattgggtaattatattgaatcatcacatacacaacaaacaaaactttcattctcttctccttggcagttgacaagattactataccataaccttgccaacttgtaaaccattaaatgacgttttcaataaaattctgaagctttgtgtgagcatcaaccatgattttcatttcttcttttgcgaaagctgtacctctttcccgagcagaatactcatagtcagaaactgcattagcatattcttcaattagcttcattaaaaacatctgcttttcagttttcattattccacctaatcatttcaagatattgaactaacttagctttggatttatccaaatctcttttagctgcttctataccgtcgtatgaatatccttcacaatgctcaactgctaattgatatgaatctatttcaatatcacgtgctaatttaatgattttttcaaactgttcgcgtgttagcatacttaaactctcgtattatgatcgataatttcatcaagaaacatatctaacgcttctaaagcattatccactttagtttcaaagtctttaatgcctttattcgaaatacccgatgaataccaagcaaagttaatgcgttcctcatctgctttacgaattaaagctaccaattccttaattttatcagcttgttcgatactaatcattattccaccacatatgaaagagagaatattgcacacgccatgtgagttgcaacttcatcacacatattataacgtttcttaagaaattctacaagttcttcactagtaacttcatccatgtcgacgaaaaaatcaccattaatgatgacgtagatatttccttcttgattgagtgcttcaattttcatgatgttctcctctttatccgatagttatatagtaccacagctcaaacggaaagtaaaccggtaaaatgaaaaaagtctcccgaaggagactaatgttattcgagggaaagaagatacttactctggtaaaacatcccagtaatatcatctatcgtgctttgaatggctggaggcatttctttataaatgctgttagattggtctagtatgcgatcaatcattttaattgtgtcggtaggaagtttactagcatctggaattgaaggtgtgtattttctaccagaataccccaaatattgctcaccaaatttatcaatcaaatctggcaactcggagaaaataaaatcgtatgctttgtgtctagcataacttttagtttcaaaatgtgcagaatgaaaataagcttgtgcagccattaataaacctaagtattcatctgcctttgaaggttttccactttgtgaaaagtcgctgaatttcattcagtctccaatttaatgttcataattctagcgtatgattgtgccatctccgcgcctcgttctatacattcaaaatcagaagagcacgggtcatttttataggtcgttctcataaaactatagaattgttcagacgattctacgcttttattttcaaaaagcatataaacgtgcctaataccagattccataaatttatcaaaatgaggatcgacattcgcttcaatcgatggagataaaacaaatgacaatcctagcatggcaaatagtgccgttgcttttaaggccataaaggcctcctatcatttttgtcctgtatttactttatgccgatgtacggccttaactttatcaaggtatttttcaaaatttcgcaatctagtatagtctgccggagattggttgagtgatacttctcgacgcaaagctgaaataacatttccaacttccctacgaatttcatctaattgaagaacagtaagattgcgaagttgcttttcagttaattgtagcatatatacccctttagttagataaacctatttataacttttgcactaaccgagctttttagttaattcattccaatgttttctacacaaagaaacataaatttcatcaccaatacagatttgattaccttctttaactggtgttccatcttccattaatcgagctgtcataatcgcttttttgccacaatgacaaactgcttttagttcaataagtttatcagcaatcgctaaaagttctttagaaccttcaaataattttccggcgaaatcagtccttaatccataagccataacaggaacattatatgtatcaacaattcgactcaattgatgcacttgttcagtttttaaaaactgagcttcatctacaaatacacaatgaatatctttttgtgcttcagcccatttatagaactcgaaaatatccatatcatctgtaataatattcgcttcctgtttaattccaatgcgagaaacgacttcacagacagaatcgcgagtatcaatagcaggcttaagaactaatacacccattccgcgttctttataattatgcgcagcagtcaaaagagaagcagattttccagcattcattgctgcataagtaaaaattaaactcgccatatcaccttcttaaagcgtattcacataagctattaattcattttctttcttatcaaaccgatcagcaaattcttcctgctgttcaggagatagcgggccgtattcatcataaaaggtgtttgcttctgtatgctcatctagaagttcatggataagctcaaacaatttatctttttgttctttgcttaggctcacagtatgtcaatccccaaaagttttaaaatgactcgtttctgattcataaccgctacgattgaatgaccgttggggtctttttgacctgatccaattataaatcctttttgcgtagaaagtttaatcaaaacatcaagttcacgtaataattgatattttaaatcatcattcattttggtttaccttctttaacgaaatcaggataaggataaaatcctgaataaaatccttcacctttatgattgatgcatcctttattagaacaatagcaccaataatcgaaatcacaagccatttcatcgttgcataaagcaaaaacaaccggccacttacacttttcacagtgggcatttttaagaatactagtttggctcataaccatgtaacctttaagcaatattcttctacatgttgtttacgacctttcttatcaataaaggtatattcaacgaatgtcccaatgtagtctttatctacatcatgtggactattaattggacatttagtacggcaaatgcgttcccattgacgaataattactgctttgtttttaggatcaaacggatgtgggtaatgcactttcataatccaccactattaaatcaatatcaggagtaaacatgtcgattaatttagaaaccttatcccaatcgccgccagcaataccacaacctatgcgtggaatgtaaattaccggtttaaacaaaagggtttctgcctgtagatttaattctatcatgcagtttactaaagcaccataatcaagattaggacctggttcgtattgcgtatacaggttatagcatataccaaatcccgtaggactatgtttaaaaacaatagacatatcgcctaatttatcgcgagaaccgtactcagtagtggttttatctatttctaaaattttgggataggctctggctaattgacccgctacacctgaacccatagtatgaaaacaattgcacccgtgcgcaataatattaccttgaagaaatagggcgacaatatcgcccttgatatattttacaatcatctagtactcaatcctcgattataagaatctaccaaacggtcaaccattgaatgacaagcggctttatctttttcctccgcaactgaacattctaaggtattccactttttagcatatcgttttaacaatgtatcatttttgtatctgcttgatttatctctttctccgtctttatatgcatatattaatttctgtgcaaattcagcttggcatgctttatttttcccgcaataatccgctgcagtacggtttacatactctctaatttcagtatatgatgtatctgctaacgcagaaaatgaaattaatcctatacataaaaccaaaattttagtcatttactatttccaaaagtttattatttttaaggtaattagccttttctaggacttcagaagcatatttagaacctgctttaacattccatcccgaattataagaggatattgcttttcttatatcgcccttatgtatatttaaccaataagaaagttcaatgtacgcccaggaagctgaattggaccgtttattcaacattctttttatttcagcatcggtcatattataaccaagttccttaactcttgctcgcatagtaggcaaataattttggaacattccgtaggcgtgatgctttggtttagattttaaattaactccgccagagctttcttgccataaaatagcagccattatatgacctaatccgctcttgtggatatttttgtgtgttttatattttccatccttagaaaattgttccccgaattgatacgcgtaacgcatgttatcgagttggacattactgaaagtatgctcggagctatgcgccatcattgaaatggccaatagaccagcgagtagtgcttttctcatgcttacctcattgagttttaattactgctttagaagcctttcctggtaaacgacgactgttaataattgccatcctacattgaagtgacgggtctttgaacttcgcattaggtttacaaactgtaaatccaagccaaagatttccatctgtgatttctaaacgtccaggacggtattcaaccccatcaataaaatcctcgtcaatgtcaggacgcggaggcatactcaggaattcattaacttctaaaacatggtcttttattttgtggaataattcaaaaacatatgtctcatcaatctcccgttgaattgcacgatcaagaagatgctgagaatattttagatgaaacgatgagacccctgctgcttttgatgcctcacgaatctcattgttaatttgacgaaactccgactcaaagtgacgacgaagcttatttcgacggataaaaacttctgtgttgatagtcatgttattctcctcttaactgatagaaaaattataccacagtcaagaggaaaagtaaacagttattctttaaatctaatcaatttattcatagactttgaaacttctgcacgaacctcatgtaggtttttaagctgttcaagacgctgctcatagtaagcaatttcatcttcttcgagacagtcctgcgaatcttctttaagataacgtgcatagtcctggaaagctttacggactacttcctggaagtcatcaagactttgaattttcttaggagcaacagatacacgacgaggggcagtataatactcataaccaaaccctgcgcttaattgagccattaatatttttcctctggttggaacacagcacgacaagcccacatactggcttctttgagtttcgttttagcaatagttaactgatcgaggctttcagcataattcttcgcgaattcacagtcttcacaattatctagtgcttcccagaattcatcgtataaagcgtcaaagataagtcctaaacgaacttcagcgtctttaatagcattcactttacctattttctcttcagtatgtggtttataacccttaatatcttcaatcatatttgacttcctcaccagtacataaatcatattcaactaaacgaataggttcatgaatgccatatccctgaacagaaatttctgtcgtaggataaattccactaatatcacccatgttccacgcttcattaaattgctgttcgcctgaattactaaaccatttggcgaaagcatttagcacatctttagaaccttcaataattatctttgccattacaaactctcagtaaaggtacgagcgataacgtcgcgctgctgttccggagtcagagagttaaagcgaactgcataaccggatacacggatggtcagctgcggatatttttccggatgcttaactgcatcttccagagtttcacgacgcagaacgttaacgttcaggtgctgaccaccttcaattttaactgtaggctgtggttcaatttcaatttcacgggcatgcaaaccgtagaaaatttctgggtctacaaaagagtcctctttaaaggttttagagacaataattcgtgcttgaataccatcttcaaaataaatagtacctttatgtgtgccttcaagaatttgatatgctttcatataacctcaattagaaaataaatttatccaagattgttctttaattaaaaatggctcagaatcatatgccattaaactttgggtaattagtcctttaaaaggcccatcaataaattccatggtaaaatatggaattttattcattaatcttgcattaggagcagtacacaaaactctgcatcctttgaatacgcctttttgtaatttgtattgcttaggataaaattcgctcaagacgttgttatttgccaaaatttcaaaatgattcaccaatttatttttaatagtttttggcgaaaaataaagatattcgaaaagttgcgtgtctgtcatcattgcattccgattatgaaaaactgtggacgagtaataccaccaatgcaacacttgctattacaacagtaatgtacagtttcaatatgaatattgtaaattttatccatatcaggagatttaacaggctcatcaattatatacaaaatccgcgaaagcgataaacctctgaacttgcttcctttattaccgataaaactacggacagaatcggtaaataagcggaatcgaatatcatcgctagaataacgagaaaattcttttttaatgtggcccgcagaaattttagcgtaagctgaagtattagaaagaacaataactgttccaccatcatacagccaattagcagcaaagttagtcacagcagttgatttaccggattgtctgccaccatctaatcgaagtgtgcaatactgcttgagtaagtcttcaaatggtgggatataatcgtttttacaaatttcttctactctagcatcagaatggtgtgtaaaagcattcatcagggatagataaggaccagttaaaaatgttctcattttattctctctaaatttgggccattccatggcgcatgaattgtccatttctgtatttacccattaccgcacttgggctcgaccttattacaggttggcgggaatccctcatagaatcatgaggtccagcttgttcccatatttcttatttgcttatttgaatgatttgacgtactgaatagaacctttactattcacgaaagcgattttaccatttttattatacatggtagcagtacgctgatagccataagtttgtttaccagattgataaccaactaatgcgaaattatcttcacccattttattctgtttagcgcgaatacgttcatgaccgtgtgccataagaaccttagcatcaccagttgaaattgatctacgagttttttcatcttcaactgtattaacaaagtcgtcaaatgaatcaaatttagcatgggatttattatacagttttccatctactgcataattatatccctgtacatccatctcaacttctgtaccatcatccaatacagcagtgattttttgaccttttttaaatttcaaaagatcagtaaaagattcagcaataatttgagaattaatagctgcttcagtgataaattcttgatatgttttcatatgtttcctttaaatgtaaatatttttgccgtaatacttgtaccagtgtggcttcattaaaattttttcatcgagtcgttgttgactcaatttaatagctgatttgcatggattataatcatttttccattctgctggaatatcgctgatgtcaggaacttcagtatcttttatactaaacccacgttttaagcattccgttataatgtctgattgacgctttcgcaaaaattctaacttatcgtaaaagaacgtaacatgaccagagcctaaaataaactcggaagatattttaaaatctttaacccgcttaccatttgccacatgtttacgaactataccaaaaacacgcggcaattcacgatactcagccataagatgttggtcggtcagttcagaaacaagtgttaaattgatacgagtcataatttcctccaagtagttgatgaatgtatagtatcaaagtccttggaggaagtaaacactatttttctgaagcgcctgaaatatatttttcaagacgttgtttcattagcgagccgttcttagcgatttcttctggtttatcgcacatacgcaacaaggcttcaagcttaacgatatcgctggtacgttcaaatttgcgagtatctatcttactagcaagttcagaaatacgtgctaatagactttcagcttcaaccaaagctgcacctagcttagttgcaaatgtgtcagtagcttcgttaagaatagattctgataaaaattcactatatgttttcatatatacgctttccaagttcctgttttaaatgttgagattacgcgtttcgcgcgattaggtgtctgacgataccatttagattgggctagatttactgctgcttcatcccagcgtttttgttggagcatacgtaaagaattagtaaatcctgccacgccggtttctcccatttggaaaaccatattaatcaatgcgcagcggcgaacagcatcaagagaatcataaactggttttaatttagcatttctcagaattccgcgaacagcagcatcaacatcctgattgaagagtttttcagcctcatcttttgtaattacaccattgcaattacgtccaatagctttatctaattcagatttggcaacactaagtgatggacttttggtaagcaaatgaccaatgccaatagtgtaatagccttcggtgtctttatagattttaagtctaagaccttcatctatacgtaacatttcaaatatattcataatacctcctaagtatttatagaaggtatttataaattaaaagaggctgttcattattcggtaaagtgaaggacccatcacatattgccactgagtacgaggaataagagcaaaagcatccatctctggaatcataacaccatctttattttcaaaataagactcgcaatggcaatttctaaacatctcatgctctactggaatcgtataataaaacagctgtaagtctttattactagaatatttaaatacacctaggtcttctagaaggtctggattataattgctaaaaccggtctcttctaagcattctcttcgtgctgcatctagtgcgctcaaatcagaattttctacacggccttttggaatatcccagcgatgtgccatcattccaggcttacgagaaccagtaacccgtcccatgaataaatctttatcttctgtcataaagataataccagctgataatgttttcattttaatttcctgcattcggtgataaaattatttaaattttgagtatatttcttttcatcaaaaatcttttgctgcctacgtaaacgccatggcatttcaatgaacgtgtaccatatcccagataatattgctgctgtaaaaatattaacaagtatggttaaaataatccaatctcccgttctgtctactggactttctccaaagaagcaaaatacaaatgatgtcacaggaaaactaataatataccacagaatcataatcttatctgtgaaccaatcagtgttcgttaatttagcgcgaccattatgaatacacacgaatttatcatctgttgcagtagatggcttaactggttgatatcccattctaaactccctaatcagcaaatttttcatatcttcggaacagccattccagtcaactctatcaactgaaatgccatcatccccatcatctaaatcataccagcgagtttttaaaatcatttgattttcctacaatcattcacgaattctttcattgattcattttcaatataagacatgtagttattatattcttttaattgtattttgtaatccttttttctttgccaatttattttaaaattatcataatgaaaatataaaataataccaaagaatgaaaataatgaaatcgctatagtataatgaagttcactccaaacttctattatatctactataccgctgacattactgcggatgtttaaaataatacagtcaatcattaatccaataagactaccagcaagagctgcagccaacgccacagcaaaaattaaaaatgactcagaaaaagaatatttgactttatttagttttggcttttgcatcgtgattccttaacaaatttcataatttcgttaaattcatgcatatctaatttaagctggtgttcctttttaatctttttacactgagctttccattcacgtacacgtttacgataatgccttccttgataccaatatcctacccaatttacaggtaccaataaaaatggaactactaatggaagaattaatactaacaaaaatattacgccagattcaatatcagtcataaagtctataaccattccaacaaccaatagaattacaaatgatatagctgtcacaggacctattaatacatcagtaggaattagctgacgctttagttcatacttcacaggtttacttggaaggtatagtgatggctttgacatattctctacattccttaacaaatttttctaataataaatcgctttcaaaattaggattttccacgaatttatcaaaaagatcatcaacgatagttaagatattctttttattaagaatacgcttattttcatattttgtttcagagtcaactataagagtaaagaaatatttctttccctgaaattttaccgtagtatcaatatataacaaatttgacttttgtaaattacgtttaaaccatgcgtcacttaaactgtaaacgccaagataatcataatcgtcatttaaataacaaactgtccattcaggagaaatgaaatcagtaaattcaacatcaaaatcacacgtcaatgaatgaattgattcaatacttttaatgagtattccaggacgtattaaagactttttacctttataaaatccagaaagactttcatcagtttcgtatgaagacccccaatagtaattacgtccttctgccatacgtttaagagcatttagtaattgatctggaacatcaacctgtctttggaactcttcaaacattgaattgaaatcactttgcattttcattcctatttactccaagtaataggggccgaagccccttatcattatttcagagaattaatatattcctggacatcggcagaggtagtttcaaccccagaaatattgccgttaaaagtttcaactcgagcaagggtatcttcaatatcaaccttagtcagtgctgcaatttcaactacatcatcggcagtactaattccaagggcatttgccgcacgagtttcacgaatatattccaatttaactgcaagttcttggcgagcatcatctaactcaactactttcttggcgatttcaattcgcatttcagcataaccgtcagctttagtagtcaactgctcagctgttcggcgatatagtaaaccgagtttagcatgcattgttacatcttgaccttcggaaagaagttttcgaatttcacgctcttttgattcggcctgtcgattcttttcgataacaagttcacgaatacgtttttcttcattaatagatttaatagaagcagtttttagatctttaattttatcaagtagttttgctgctgcagcagtatactgttcttcaacagatagatttttagccatagcagaaccaagtttagtgcgaataaactcaacaattttcttcagtgtgttcatagtatttccttagattgatacaattagataatatcacgtttttaatagattgtaaacttattcttcgtctatctcatcgataaagacgtcaatggcctcgataacggcatcattgatagccaataaagtaaaatcatcgtcagtacctttataagattctgaagcattgatatatgcttgattgacgagttcccaagcctttttaaaataaggagtttcatcatcaggacaaatatcccgcacaccttcaaagatacgattggcataatctaacacccattgtacaggcatgttttgagaacgttcgttaaactctttaaattccttagattcaaaaagctcttcaggataataatttcgattacaaaaagctttactaaagttacgtttcataatgttctcctcaagctacaggctcataatatctcaatcatgagcctgtgtaaacttatttcatattattgaaatattcttctgcgatttcgtcgttatcatggtaaactttagaagacagtttaacataaccttcagcagtgaacatgttaatcacaacttttacagtataccactgaccgtcttcattacccattactgcgtaagtttcaaacatcggatggtcaggaccgataactttaatatcattcactgtacgaccgaaatcttctgaaacgcatttcataaagaagttgaacagttcgccgtaattatccatttcattctccaagttgttttctgtatcagtagttgatagttgtatagtaccatggaagaacagggatgtaaaccgttttgtgaaaaattttttaaaaagttttagagaattctagggagggaaggggcaattaaaggataggataatatattataaagggtagaaactaaatgatgcctagagaggtccagaaaggcctagatgccaaaaagccctatcatttagatagggatttaaaattatttatctagtttagttattatagcttctgcggcagcttttagcttagatgcggtgttaatacgatttttaatttcagtatacgcatcgccaagaacatcaaggctatcagaataaacacttacactattgcgttcgctatttgaaatagaacctttagttttacgttcaaaatcggtgtacacgtcttgaagatcacgggctgccttctttgcatcatccaatgcatcaagagctttattcaaagcattaacatattttttagtgtcgaacatattcttagaaattttaacaggtgcacgttcaggagtagctaaggcagatttaggaacctgagcgccagatgccaatttcttagaaattttgaaaaatgctttattgaaactattttcttgactcatcgtaaaagaactattatcaatgttatacatttcaatagctttagctttccacttaagaaaatcgccacggtcttttgggtccaagtggaagaatactttagtaagatctgcttcagatggtaattttgctgcttcggttaaaaattcggcgtaggttttcatttaaaatccttgaaataatttattggttattaattatttatcacgttgttatatgtaacagcattctccgagcgattcaaactaaaaagccccaacctttctgtcggggctaagaatgttatttaatttgcttagcagaccaaatgcggtctttgataattttttggatgtcttcaacatactcaagagagtgaacatgtgggttatctttgaaactataagcacgagctagcttttggccttcagttttgattactaaaagctctttaaggatagcttcatatttggagataattcctttaacaatatttttctcttgtgcgactttaggatctgctttaggagcaggtttaccagaagcctttgcaaaagcagcgccagtagcaactaaacttttccaggccatactaactgcatttcccgtaaatccttccgctttcatgtcgcgtgcgaactggaatcgcgattcatcagaagcatctttataagaatatttacccgctgcaatggctgcttttgcgacagcttgaatttcggtgctagatgcttcatttaacaccgcttcatttaaaaattgagtatatgatttcatcttatttcctgttttaatttgtagatttaatatacttatttataccaaaaagccccaacctttcggtcggggctaagccttgcggcaaccttgtcggggttccacctgctaaggcaagtgtttgtacgaaacgccgggattcgaacccggttatcaagcagttgacgctactcaatatttttaaaaggccatatctcgaccatatccgaacgttccgtcaaaaacgctactcggcttacggcaaagatatttcctcgaatcgataattcggtgcgccgtttctgctgtgatataaggggacattaacaaaacataaagatttattaatgccagtccttaaacagggaacatcagtccgacgacttaccggtagcgacccggtttcttaatattcttttaaagcatcaatctgttcacggcgtttacgccataaatcaattgcttcatacgcagattcagcatttcgaatttgacggcatttatataaagacttgtgattttgatattgcgtagataacggaattttatctaaaaggtctttacgttcaaagtattcgtaaccatctaagccaaatgaacgatttttgagaaattgccaatgaccatattcgttttcaacataaacataatccgcgtgttgataaagcaaattaattacacgttcagaaataacagtgtcattgtgattaaaataaaatgttaaatcatgaactactaaataaacattacctttcatattttcctcacttataattggtcgaggcagtagggatcgaacctacgacctaggacttagaaggtccttgctcttccttctgagctatgccccgtaattggggtgaccgatgggagtcgaacccatgactacgagaatcacaatctcgagttctaccaactgaactacggccacattaatacctactccaacaatcaagatgtcttcacacgaaattaagagaagagtgatcagttcaacccttataatcgcgtcaagtagatattaatgtgacagttgtcacaaatttggcggacgtgataggattcgaacctataaccaatcgcttaacaggcgatcgctctgccattgagctacacatccaaattggtggggagtgatggagtcgaaccacccgagtcgcaatgacaatgaatttacagtccacaccgctacctctacgggataactccccttaatttggtggccctgggtggaattgaaccaccatctggcgattatgagtcgcttgcttgaaccttccagctacagggccttggtgctgattgacggaatcgaaccgccgacatcctcattacaagtgaggtgctctacctactgagctaaatcagcaaaactggcggaggcgataggatttgaacctatgagtcgccggagcgactgccggttttcaagaccggtgcattaaaccactctgccacgcctccagtctccatacaaggatttgaaccttggacctcctgatcccaaatcaggcgctctaccaaactgagctacacggagtaaattaaattggagcggataatgagaatcgaactcacatcatcagattggaagtctgaggtaatgccattatacgatatccgcaaatttggtgcgagaagtgggactcgaacccacaaggaaatcattccgcagcattttaagtgctgtgcctttaccaatttgaccattctcgcgctgggaataaaggactcgaacctttgcatctagcagtcaaagtgctatgccttaccaacttggctaattcccaattattaacaaaggctctcaaacaagaacccttgatgatagagggtattaatcagtgcggtatgagttaataataacaaataattcttaaagcatatttaccatttatgataatacatatttacgatgcattcaagacccaaaggattcttgaaaatatcatattcaagaggacctttttctgtttcaataaagaaatcaaaatttactgtattaaatttacggtcttccttcactaatttaacttgagaagatgaacggtcaacataaaccttttcaacttcaaaacatgttaaaacgccataatcatcaatcaaggctttagccgcgtcttgatcatatttatatccattttcaatggatgatactttagcataaagaatcattatcagccttcatcaacaatagtatgagtgtgggcatttacaatttgccaccaatcaaagcgattagaaccatacatcggtttgttttcattttctttgataatatcacggagttcatcttcggtagcggctttcgcgattaaatcagcatatccaccacgaggataataattatcacctgcaaaaagtaaaaagtttggtttaatattattaaactcttcaagagtaataactgttccaccaggttgagcaatatctacataactatatcctaatttttgagcagcatctactgcttcaagcagggtatcatgagcccatccaatttggcaatctggcttttcagatggattagcctgataatccgcgtacactttatacattctattcacctttagaaattttatccataacgatagcaattaaaccaattaaaaatgctactacaagtgaaaaaacattttctgctgtagtcaataatccgcatataaatccaacaaacattgaaaaactaaaagcggaagcagaaattgcaatagcaacatttcgaattaattcacaacgtttcattttattctcctcggtagttgatagggtaatagtatcactaccctatctaaaagtaaacttattttttacgaaaaattgatttatatttatcagcccatttctcaatgacttttgccgggccatagataacaaagtaatcgccaaactcttcaccaccgagttgaccgaaatcatctaatgcatcacgaagaactccatgaggcatttcacccattttatctttcttgccagtgtaaataaactcaacttttacatcagcagtttcagcaataaattcttgatacgttttcattttgttctccaatttcacatttgttttgatagggtaatagtatcactactaaaaccccatgtaaacaactttgtgaaattattttaaatcatctgcccaatcaagtttaagaggctctttatattcacgatctaatacgaccggaatttgtacatcaccgctaaatgataagggtccaacattataagacaatgttatatgcggtgtgtaatcatcaaaatcatgtgtagcacctagtgaccgcgcatacatgtgtcgacagcgcagatattcagaatctagtacaagtacaagagtagatccatcttgtgttttccatacttctaaatgtccagaagaagctacttcaaaacttccgcttgatggaacatacggaacatttactctcgaataacatatagtcgaatgaattttttctctaggaactggattaggaacacgtaaagagcgctggagttcttccagcgcatcaagtgttaattctgaaaacttagctgctacataaagacccgttgaaaagtctttaaattccattattcttcgtcttttgcttcatcagcagattcagcagtaagattcttgacagcttcaacgatttcttcaactttgatagtatcgccagtgatacctactgcacgagcaatttcagccaaagttccttgcagaattttggattcttccatcagacgagccgcctggtcctgcgtatcaaggatacgagacttcagagttacgatttcagcagacagtttttgttcaatagtttgttcagacattatagtacctttagtgtatttttaattttagaaaaaagttcttcaagagaaccatcgtttgtaattactaaatcgccatcacgaattggcaatccagcttctgtaatatgagtatcattggatttttgaccaggacgaactacatgaattactgtagcacccatcgccctagccgcatccatttcatgatcttgacgagtatcaggaacgatataataatcataacctgagttaaatttatcaagataatctaaagcaaataattttacccaatacatgcggtcgaagttattaacaatcaaatccgtacctagggcttgcatcagacgacggactgaccattgatcttcaatattatttataacgtcagcaatcttgttaaatgctacgaaattaactgcgtcatcaaaaacaaacacacctttaattgggcttttactattaagatagcaaaatgcttgttccataatcgtaattacttctaatttagtcagatttaaattagtttcacgatcatagtcaattccttcaaactctttacgagttaaacaaggatagtcagtgtttgctgcaaatacaccccatgcataagccaatgcatccttaataggaccagcaagttgatatttaactgcagaataattattcataataaaatctgcagtagtatcttttccactacgctttacaccacttaaaaagattagtttcatatgtttctcctcaaatttagttaagattataacacatgaaactgaagcattaaacttctgctataatttttccatctttttctacttgaaaatacgtataaggaatcgttgctgtgcatactaaggctgggtctgaatcttctgtgtagctaaattctacttcagacaggtcagaaacccagggcttataaaaatttattgacatcacgatttcagttttactattatctaaaatgtaaagcgtaatgtattcaggacctgttttttgggcagtattttcgcctgtaagatagttactagttcctagcatccattcatacattcctatccatgacttaagctcttcatcaactataaatctcacgatgagtgggtcgtactcaaatgtaacacctggacgttgtgctcggcctagtccaaacggcccagtcacggtatcagtaacaggtatcctaattcccggaataggaactgactgagcatttaaagtaaaagcagatgtagtattactatgcggtattgatactacaaagttagttgtatttgcttggttaaaaatttgttgtagtgcttgcgacatatattcctcataatgcttcataaatgttggtggtataatgggtctaagtcccttccattcaattccaattagaacaaacaatagaaaagaatggaagataatagaattagatatttgaccagactttgtttgcagagaaacgttttccttttgaaacgaactgctgaagtggcattaacacaacgttcgcccagtctttcggggcgatttcaacgaggctacccataatattaccaggtatatatgccttaatcatttggtctgcacccctaaatcctttcacttgactccaatcaatttttaatttcgttttattagtaatagtaggtgtatttgaatattgctttaaaagctcttctagaaattgctgacgagctttaggtggaatatagtgcaagttcaatccgtacattaaattatgtttacctaaaccaaggtaaattatcaaaggaaatttatcccaataaggaagagtttccttgtgtttagcatcataagcaaaagcatatattcgtcccggctgcgggcgaacaactttatgtccttttacttgcttaatagtttcagcaaaccactttctggttttattattaattgctgcaccttcattacgaattttatcacgcaatgtttgcctgaatgaatttatcataagcagttgtctttcttgcttattgagtttattcattggttttgattcaagcttttgaatcttttcagccgttttaattcctgaagcatattttgacattgccgaagtaaacgtagagtatttgattcctctttcttcagcaaattgctttcctgtcattccttttgctttggcctttctgtattcaagacctatctgaatccatttcttttcgtttaatgattgcttaacctttggaacttggggagtgctttcattaattatttgaaaaatagccattatgcccccttaaagccaagagctcttaatccatcttctgttagaattctaaattttattccacgcttttcagctaaagcttgcgctgctttccatttgtcagtattaacggaatatgtataaatttcattcataaatcttttcttcgctgcagttgttagatgtgccggtttaactggtggttgtgtttcttttttaggttttatttcaataaaaaattcttgtccagaagaatctttcatccaaatatccatgaagtatctacgttttttcccttctgcattacaaaaataaggaattactgctgtttcactaccccatgcaataatttctggatttttatctaaccattcaaaaaagaatttttcccaatttgatctatacgtaatttttttagggtcacctctatattttgatatatttttaggaacccattttccagaatatgccattggattctccttataaatagataatatatttataaacaggagggcccatgctctttacattttttgatccgattgaatatgcggccaaaacggtgaataaaaacgcgccgactattcctatgacagatatttttagaaactataaagactatttcaaacgcgctcttgcgggatatcgcttacgcacttactatatcaaaggttcaccacgcccggaagaattagcaaatgctatatatggaaatccgcagttgtattgggttttattgatgtgtaatgataattatgacccgtattatggatggattacttcgcaagaagctgcttatcaagcatctatacaaaaatacaaaaacgtaggtggagaccaaatagtatatcatgtgaatgagaacggtgaaaaattttataatttaatatcatacgatgataatccatatgtttggtatgacaaaggcgataaagctagaaaatatcctcaatatgaaggagcacttgctgcggtcgatacgtatgaagctgctgttcttgaaaatgaaaaacttcgtcaaataaaaataatagcaaaatcagacatcaattcatttatgaacgaccttatacgtataatggagaaatcttatggaaatgataagtaataaccttaattggtttgttggtgttgttgaagatagaatggacccattaaaattaggtcgtgttcgtgttcgtgtggttggtctgcatccacctcaaagagcgcaaggcgatgtaatgggtattccaactgataaattaccatggatgtcagttattcaacctataacttctgcagcaatgtctggaattggaggctccgttactggtccggtagaaggaactagagtttatggtcattttttagacaaatggaaaactaacggaattgtccttggcacatatggcggaatagttcgcgaaaagcctaatagacttgaaggattttctgacccaactggacagtatcctagacgtctaggaaatgatactaacgtattaaaccaaggcggagaagtaggatatgattcgtcttctaatattatccaagatagcaatctagacactgcgataaatcctgatgatagaccattatcagaaattccaactgatgataatccaaatatgtcaatggctgaaatgcttcgccgcgatgaaggattaagactaaaagtttattgggatactgaaggatatccgacaattggcattggtcatcttatcatgaagcagccagttcgtgatatgactcaaattaataaagttttatcaaaacaagttggtcgtgaaattaccggaaatccaggttctattacaatggaagaagcggtaactttatttgaacgtgatttggctgatatgcaacgcgacattaaatcacattctaaagttggcccagtttggcaagcagttaatcgttctcgtcaaatggcattagaaaatatggcatttcagatgggtgttggcggtgtagctaaatttaacacaatgttaactgctatgttagccggagattgggaaaaagcatataaagctggtcgtgattcattgtggtatcaacaaacaaaaggccgtgcatcccgtgttaccatgattattcttacgggtaatttggaatcatacggtattgaagtgaaaacaccggctaggtctttgtcagcaatggctgcgactgtagctaaatcttctgaccctgctgaccctcctattccaaatgactcgagaattttattcaaagaaccagtttcttcatataaaggcgaatatccttatgtgcatacaatggaaactgaaagtggacatattcaggaatttgatgatacccctgggcaagaacgatatagattagttcatccaactggaacttatgaagaagtatcaccgtcagggagaagaacaagaaaaactgttgataatttgtatgatataaccaacgctgatggtaattttttggtagccggcgataaaaagactaacgtcggtggatcagaaatttattacaacatggataatcgtcttcaccaaatagatggaagcaatacaatatttgtacgtggcgatgaaactaagacagttgaaggtaatggaactatcctagttaaaggtaatgttactattgtagttgaaggtaatgctgacattacagttaaaggagatgctaccactttagttgaaggaaatcagactaatacagtaaatggaaatctttcttggaaagttgctgggacagttgattgggacgttggcggtgattggacagaaaaaatggcatctatgagttctatttcatctggtcaatacacaattgatggatcgaggattgacattggctaatatacttccaatgagcgctgatttaggagaatccatggaaggttcttctatcgacgtcacctttaccgctcaattagaaacaggtgaaacgttagtatctataaatataactagttacgaagaaactcctggggttttagtagaagaaaatctcttatatggaacatatgaatctgtatttggtttcggaaatgacgcgttgaaatatcgtttaggcgatgaatttaaaactgctgcttcatgggaagaccttccaactgattctaatactcagttatatttatggaaagctcctcaaaacctccagaagacattcacttacgaagtaacattaatatatgactaccaagaacaaagtgaatctggaggttctggcagtaattctaggtcatcttctgatactactgaaccaacggatcctcctgctccaataagaaaaactctcgttaaaaattatacaaaaactatagttggaaattggagtcgttgggctaataaattgagaagctacgtgtatgagaggccataaatgtcaggattgagttatgataagtgtgttactgccggccatgaagcatggcctccaacagttgtgaatgctacacaaagtaaagtattcactggaggaattgctgttctcgtagcaggtgatccaattacagaacacacagaaattaaaaagccatatgaaacacatggcggagtgacacaacctagaacttctaaggtatatgtcactggaaagaaagctgttcaaatggctgatccaatatcatgtggtgatactgtggctcaggcatcatctaaagtattcattaaataggatttaaaatggcaaatacccctgtaaattatcaattaacaagaacagcaaatgctattcccgagatattcgtcgggggtacatttgctgaaataaaacaaaacctcattgaatggcttaatggtcaaaatgaatttttggattatgattttgaaggctcaagattaaacgttctgtgcgaccttttggcttataatacattgtacattcagcagtttggtaatgctgccttgtatgaaagctttatgcgtactgctaatttgcgtagttcagtagttcaagctgcacaagataatggatatttacctacttcaaaatcagctgctcaaactgaaattatgctaacttgtacagatgcattgaatagaaattacattactattcctcgtggtactcgctttttagcatacgcaaaagatacttccgttaatccttacaactttgtatctaccgaagatgttattgctattcgtgataaaaataaccaatattttccacgtttgaaattagcccaggggcgtatagtaagaactgaaatcatttatgataaattaacacctattatcatttatgacaaaaatatagatagaaaccaagttaaactatacgttgatggagcagaatggattaactggacaagaaagtcaatggttcacgctggttctacatcgacaatttactacatgcgtgaaactattgatggaaatactgagttttattttggtgaaggtgagatttctgttaatgcggcagaaggagcattgactgctaattatattggaggtcttaaacctacccagaactctacggttgttattgagtacatcagtactaacggtgcagatgcgaatggcgcagtcggattttcatatgcagatacattaacaaatataactgtcatcaacattaatgaaaatccaaacgatgacccagattttgttggggcagatggcggcggcgatccagaagatattgaacgtattcgcgaattgggtactattaaacgcgaaacccagcaacgctgcgtaactgcgactgactatgatacattcgtttcagagagatttggttctattattcaagcagttcagactttcactgattctactaaacctgggtatgcatttattgctgctaaacctaaatcaggattgtatttaactactgtgcaacgtgaagatattaaaaattatctcaaagactataatttagctcctattacgccatcaattatttctcctaattatctttttattaagactaatttaaaagtcacatatgctttaaataagctgcaagaatccgaacagtggctcgaaggtcaaataattgataaaattgatcgttattataccgaagatgtagaaattttcaactcgtcttttgccaagtctaagatgttgacatatgtagatgatgcagatcattctatcattggttcatcagcgacaattcaaattgttcgtgaagtacaaaacttctataaaacgcctgaagcaggtattaaatacaataatcaaataaaagatcgttctatggaatctaatacgttttcatttaattctggacgaaaggttgtaaatcctgatactggtttagaagaagatgtattatatgacgttcgcatagtatcaacagaccgagattctaaaggaattggtaaagttattattggtccatttgcttctggcgatgttacagaaaatgaaaacattcagccgtatacaggcaacgattttaacaaattagcaaattctgatggacgcgacaaatactatgttatcggtgaaataaattacccagctgatgtgatttattggaatatcgctaaaattaatttaacatctgaaaaatttgaagttcagactattgaattatattctgacccaaccgatgatgttatctttactcgcgatggttcactgattgtatttgaaaatgacttacgcccacaatacttaactatcgatttggagcctatatcacaatgacagtaaaagcaccttcagtcactagtctcagaatttccaagttatccgcaaatcaggtgcaagtacgctgggatgacgttggtgctaatttctactattttgtagaaatcgctgagacaaaaacaaactcgggggaaaatctcccgagtaatcaatacagatggattaacttaggatatactgcaaataacagcttcttttttgatgatgctgatccattgacatcatacattatcagagtagccacagctgcgcaagattttgagcagtctgattggatttataccgaagagtttgaaacttttgctacaaatgcttatacatttcaaaacatgattgaaatgcaattagccaataaattcattcaggaaaaatttactcttaataattctgattatgttaattttaataatgacactataatggctgcattgatgaatgaatcgtttcaattcagcccatcatatgttgatgtttcatcaataagtaattttattattggtgaaaatgagtatcatgaaatacaaggttctattcagcaggtatgtaaggatattaaccgagtttatttgatggaatcagaagggattctatatctttttgagcgttatcaacctgtagttaaagtatctaatgataaaggacaaacctggaaagctgtgaagctcttcaatgaccgcgtaggatatcctttatctaagacagtatattaccaatctgcgaacacaacatacgttctaggatacgacaagattttctatggccgcaaatcgactgatgttagatggtcagctgacgatgtcagatttagttctcaggatataacattcgctaaacttggcgaccaattacatttaggatttgatgtagaaatttttgccacttacgcgactttgccagcgaatgtataccgcattgcagaagctattacttgcaccgatgattacatttacgttgtcgccagagacaaagttagatacataaaaacgagtaatgcacctatagattctgatccattatctccaacatattcggaaaggctttttgaacctgatacaatgactataaccggaaatcctaaagcagtatgctataaaatggattctatcggtgataaagtttttgctcttattattggtgaagttgaaacactaaatgctaatcctagaacatcaaaaataattgattctgctgataaaggaatatatgttttaaatcatgacacaaaaacatggaaaagagtttttggcaacactgaagaagaaagaagacgtattcaacccggatatgcgaatatgtcaactgatggtaaattagtttctctgtcttcgagtaattttaaatttttaagtgataacgttgttaatgaccctgaaactgctgtaaaataccagttaatcggtgctgttaaatatgaatttcctcgcgaatggttagctgataaacattatcatatgatggcgtttatagcggatgaaaaatctgattgggaaacttttactcctcagccgatgaaatactacgcagaaccgttctttaactggtctaaaaaatctaacacacgttgttggataaacaactccgatagggttgtagtagtttatgctgatttaaaatacactaaagttatagaaaatattccggaaacatcaccagatagattagttcatgaatactgggatgatggcgattgtactatagtaatgccaaatgttaaattcactggatttaaaaaatatgcatctgggatgcttttctataaagcctctggtgaaataatttcttactatgattttaactatcgtgttagagacactgtcgaaattatttggaagccaactgaagtatttttaaaagcatttttacaaaaccaagagcatgaaactccttggtcgcccgaagaagagcgtggattagctgaccctgatttaagaccattgattggcacaatgatgcctgattcttatttgttgcaggattcgaattttgaggcattttgcgaagcatatattcagtatctttctgatggatatggaactcagtataacaatttacgaaatttaattcgtaacaaatatccacgagaagagcatgcatgggaatatttgtggtcagagatatataaaagaaacatttatttaaatgctgacaaacgtgatgctgttacaagatttttcgaatcacgtagctatgatttttattctactaaaggaattgaagcatcatacaaatttctttttaaagttctttataatgaagaggttgaaattgaaattgaatctggagctggtactgaatatgatataatcgttcaatccgattctttgactgaagatttagtaggacaaacgatttatacagctacaggaagatgtaatgttacttatatagaaagaagctattctaacggtaaattacaatggaccgtaactattcataatcttttgggaagattaattgccggtcaagaagttaaagcagaaagactccctagttttgaaggcgaaattattcgcggggttaaagggaaggatttgcttcaaaataatatagactatattaatagaagtcgatcatattatgtaatgaaaattaaatccaatttaccttcttcccgctggaaatctgacgttattcgttttgttcatccagtaggatttggatttatagcaattacccttttaacaatgtttattaatgttggtttaactcttaaacatacagagactataattaataaatacaaaaactacaaatgggattctggattgcctactgaatatgctgatagagtagctaaattaactccaaccggtgaaattgagcatgattcggtaacaggcgaagcaatttatgagcctggcccaatggctggcgtagaatatcctcttcctgatgactataatgctgaaaataacaattcaatatttcaaggtcaattgccgtctgaacgacgtaaattaatgagtcctttattcgatgcatctggaacaacatttgcacaatttagggatttagttaataaacgtctaaaagataatataggaaatccaagagaccctgaaaatccaacacaggttaaaatagatgaatgattcaagtgttatctatcgtgcgatagttacttcaaaatttagaacagaaaaaatgttgaatttttataattcaattggaagtggtccggataaaaacactatctttatcacatttggaagatcagaaccgtggtcatcaaatgaaaatgaggtgggctttgctccaccttatccaaccgattctgtattaggtgtaactgacatgtggactcatatgatgggaaccgtaaaggttcttccatctatgcttgatgcagttattcctcgtagagattggggagatactagatatccggatccatacacatttagaattaacgatattgtagtgtgtaactcagctccttacaatgctactgaatcaggcgcaggctggttagtatatcgttgtttagatgttcctgataccggaatgtgttcaatagcatctttaactgataaagatgaatgccttaagttaggtggaaaatggactccttctgttaggtcaatgactcctcctgaaggtcgaggagacgcggaaggaacaatcgaacccggcgacggatatgtttgggaatatctttttgagattccgcctgatgtatctataaatagatgcacgaatgaatatatcgtggttccttggcctgaggaattaaaagaagacccagctagatgggggtatgaagataatctcacttggcaacaagatgattttggattaatttaccgtgttaaggcaaatactatccgttttaaagcatatttagattcagtttattttcctgaggctgcattgccgggaaataaaggatttagacaaatatcaataatcacgaatcctcttgaagctaaagctcatccaaatgacccaaacgttaaagctgaaaaggattattatgatccggaagatttaatgaggcattcgggcgaaatgatttatatggaaaataggccacctattatcatggcaatggatcaaacagaagaaatcaatattctgtttacattttaacttaagggagcccatgggctccctttttctttataaatactataaactcataaggaaaccgctatgttcattcaagaaccaaagaaattgattgataccggcgaaattggtaacgcttctactggtgatatcttattcgacggtggtaataaaattaatagtgattttaacgcaatttataatgcgtttggcgatcaacgtaaaatggcagtagcaaatggaactggagcagatggtcaaattatccatgctactggatattatcaaaaacactctattgcagagtacgcaactccagtaaaagttggcactaggcatgatattgatacctctactgtaggtgttaaagttatcattgaaagaggcgaacttggcgactgcgttgaatttattaactcaaatggatctatatcagttactaatcctttaacaattcaagccattgattcaattaaaggtgtttcgggtaatttagtagtaactagcccatatagtaaagtaactttacgctgtatttcatctgataattctacatcggtttggaattattctattgaaagcatgtttggacaaaaggaatcaccagctgaaggtacatggaatatttctacatccggatcagttgatattccattatttcatcgcactgaatacaatatggctaaattgctagttacatgccaatcagtagatggaagaaaaattaaaacagcagaaataaatattcttgtggatactgttaattcagaggtcatttcttctgaatatgctgtcatgcgagttgggaatgaaaccgaagaagacgaaatcgctaatattgcatttagtattaaagaaaattatgtaacggcgactataagttctccaactgtcggtatgagagcagcagttaaagttatcgctacgcagaaaatcggggtggctcaataatgaaacaaaatattaatatcggtaatgttgttgatgatggtaccggtgactacctgcgtaaaggtggtataaaaataaatgaaaactttgatgagctttattatgagcttggtgatggagatgttccatattcagccggtgcctggaaaacttatgatgcttcatctggccaaacactaaaagctgagtgggggaaatcatacgctattaatacctcttctggaagagtaactataaatcttccaaaaggaactgtcaatgattacaacaaggtaattagagccagagacgtatttgctacatggaacgttaatccagttacactggtagctgcttccggtgatacgattaaagggtctgcagtaccagttgaaattaatgttcaattcagcgatttagaattagtgtattgtgccccaggacgttgggaatatgtcaaaaataaacaaattgacaaaattaccagttcagacattagtaatgtagctcgtaaagaatttttagtcgaagtccaaggacaaacagactttttagatgttttccgtggaaccagttataatgtaaataacatcagagtaaaacatcgtggtaacgaattatattatggcgatgtatttagcgaaaacagcgattttggctctccgggcgaaaatgaaggagaactggttcctcttgatggatttaatattcgattaagacagccttgtaatattggtgacactgttcaaattgaaacatttatggatggtgtatcgcagtggagaagttcatatacaagacgtcaaattagattgttagattcaaaattaacgtcaaaaacttctttagaaggaagcatttacgttactgatttatcaacaatgaaatcaattccgttttcagcttttggattaattccaggtgaacctattaatcctaattctctcgaggtccgttttaatggaattttacaagaattggctggaacagttggaatgccattatttcattgcgttggtgccgattcagacgatgaagtagaatgctctgttttaggtggaacttgggaacagtctcatactgactattcagttgaaactgatgaaaacggcataccagaaacattgcacttcgatagagtatttgagcatggcgacattatcaatatcacctggtttaataatgatttaggtacattattaacaaaagatgagattattgatgaaactgataatctctatgtatcacaaggaccgggagtagatatttctggcgatgtaaatttaacagacttcgataaaattggttggccaaatgtagaagcagttcaatcttatcaacgtgaatttaatgctgtttcaaatatctttgatacgatttatcctattggaactatatatgaaaacgctgttaatccaaataaccctgttacatatatgggattcggctcatggaaattatttgggcaaggaaaagttttagttggatggaatgaagatatttcggaccctaactttgctctaaataacaacgatttagattctggcggaaatccttcgcatactgcaggtggaacaggtggttctacttctgttacattggaaaatgctaatcttcctgcaactgaaacagatgaagaagttctaatagttgatgaaaatggatcagtcattgttggtgggtgtcaatacgatccagatgaatccggtccaatttacactaaataccgtgaagctaaagcatctactaactctactcacactccgccaacatcaataactaacattcaaccatatattacagtttatcgttggataaggattgcataatgagtttacttaataataaagcgggagttatttcccgcttagccgattttcttggttttagacctaaagctggtaatatagatgtaatgaatcgtcaatcagttgggtcagtgacaatttctcaattagcgaaaggattctatgaaccaaacgtagaatcagctattaatgatgttcataatttttctataaaagacattggtacaattattactaataaaactggtgtttctcctgagggtgtttctcaaactgattattgggcattttctggaactgtaacagacgattctcttcctccgggttctcctgtcacagtattagtatttggtcttccagtttcagcaacaactggaatgacggcaattgagtttgttgcaaaagttcgtgttgcccttcaagaagctattgcgtcatttactgctatcaactcatataaagaccatccgacagatggtagtaaattagaagttacttatttagataatcaaaaacatgtattaagcacatattctacatatggaataactatttcacaggaaattatttctgagtctaaacctggctacggtacatggaatttattaggcgcacaaactgtaactttagataatcagcagactcctacagtactttatcattttgagagaacagcatgagtaataatacatatcaacacgtttctaatgaatctcgttatgtaaaatttgatccaactggtacaaattttccggaagagattactgatgttcaggctgctatagcagccatttctcctgctggcgtaaatggagttcctgatgcatcgtcaacaacaaagggaattttatttcttgccactgaacaggaagttatagatggaactaataataccaaagcagttacaccggcaacgttggcaacaagattatcatatccaaatgctaccgaagaagtttatggacttacacgttattcaacagacgatgaagctgtagctggtgttaataatgaatcatctataactccggctaaatttactacagcaattaatcacatttttgatacacgaatttcttctgaaagttcacttggcgttattaagttatcatctctaccgcaagcattagctggtgcagatgatactactgcaatgactccattaaaaacgcagcagttagctattaaattaattgcgcaaattgctccttctgaaaccacagctaccgaatcggaccaaggtgttgttcaattagcaacagtagcgcaggttcgtcagggaactttaagagaaggctatgcaatttctccttatacgtttatgaattcatctgctactgaagaatataaaggcgtaattaaattaggaacacagtcagaagttaactcgaataatgcttctgttgctgttactggtgcaactcttaatggtcgtggttctacaacgtcaatgagaggcgtagttaaattaactacaactgccggctcacagagtggaggtgatgcttcatcagcactagcttggaatgctgacgttatccatcaaagaggcggtcaaactattaatggaacactccgcattaataacacgcttacaatagcttcaggtggagcaaatattaccggaacagttaacatgaccggtggttatattcaaggtaagcgtgtcgtaacacaaaatgaaattgatagaactattcctgtcggagctattatgatgtgggccgctgatagtcttcctagtgatgcttggcgtttttgccacggtggaactgtttcagcgtcagattgtccattatatgcttctagaattggaacaagatatggcggaagttcatcaaatcctggattacctgatatgcgtggtctttttgttcgcggctctggtcgtggctctcacttaacaaatccaaatgttaatggtaatgaccagtttggtaagcctagattaggtgtaggttgtactggtggatatgttggtgaagtacagaaacaacagatgtcttatcataaacatgctggcggatttggtgagcatgatgattctggagcattcggtaatacccgtagatcaaattttgttggtacacgtaaaggacttgactgggataaccgttcatacttcaccaatgacggatacgaaattgacccggcatcacaacgaaattccaaatatacattaaatcgtcctgaattaattggaaatgaaacacgtccatggaacatttctttaaactacataattaaggtaaaagaatgacagatattgtactgaatgacttaccattcgttgacggccctcctgcggagggccagagccgcatttcctggattaaaaacggcgaagaaatattaggagctgacacgcagtatggaagcgaaggttcaatgaatagacctacagtttctgtactaagaaatgttgaagttcttgataaaaacattggaatacttaaaacatctttagaaaccgcaaatagtgatattaaaaccatccagggcatcttagatgtatctggtgatatagaagctttagcacaaataagtatcaataaaaaggatatttctgacctcaaaacgctaaccagtgaacatacagaaatattaaatggaactaatagtacagttgacaacattcttgctgatattggtccatttaactccgaggccaactctgtatacagaacgatcagaaatgatttactgtggataaagcgtgaacttggacaatacactggtcaagatattaatggtcttcctgttgtaggaaatcctagtagtggaatgaagcatcgcattattaataatactgatgtcattacttcacagggaatacgtttaagtgaattagaaacaaaatttattgaatctgatgtaggttctttgaccattgaagttggtaatcttcgcgaagagcttggaccgaaaccaccgtctttttcacaaaacatttacagccgcttaaatgaaattgacactaaacagacaacagttgagtctgacattagtgctattaagacctcaataggatatccaggaaataattcgattattacgagtgttaatacaaacactgataatattgcatctattaatttagagctaaatcaaagtggaggtattaaacagcgtttaaccgttattgaaacttctattggttcagatgatattccttcgagtattaaaggccaaatcaaagataatacaacttcaatcgaatctttaaatggaatcgtcggtgaaaacacttcatctggtttaagagcgaatgtttcgtggttaaaccaaattgttggaactgattctagcggtggacaaccttctcctcctgggtctcttttaaaccgagtttctacaattgaaacttctgtttcaggcttgaataacgatgttcaaaacctacaagtagagattggtaataacagcacaggaattaaagggcaagttgtagcgttaaatactttagtaaatggaactaatccaaacggttcaactgttgaagaacgcggattaaccaattcaataaaagctaacgaaactaacattgcatcagttacacaagaagtgaatacagctaaaggcaatatatcttctttacaagacgatgttcaagctctccaagaagccggttatattcctgaagctccaaaagatggccaagcttacgttcgtaaagacggcgaatgggtattactttctacctttttatcaccagcataacatggggccgcaaggccccaaaggattttaaatgtcaggatataattctcagaatccaaaggaactcaaagatgtcattctaagacgtttaggggctccaattattaatgttgagttaacacccgatcaaatttacgattgtatccagcgtgccctagaattatacggtgaataccattttgatggactcaataaaggttttcacgtattttacgtaggggacgatgaagaaaagtataaaactggagtcttcgatttaagaggttctaacgtatttgcagtaacccgcattttacgcacaaatattgggtcaataacgtcaatggatggaaacgctacatatccgtggtttactgactttcttttaggaatggctggtattaatggcggaatgggaacgtcttgtaatagattttatggaccaaatgcctttggtgccgatttggggtattttactcaacttaccagttatatgggaatgatgcaagatatgctctctcctattccagacttttggtttaattcagcaaatgaacaactcaaagtcatgggaaacttccaaaaatatgatttaattatcatagaaagctggactaaatcatacattgatactaataaaatggttggaaatacagtaggatatggaacagtcggtccacaagatagctggtcattatctgaacgttataataacccagaccacaatttagtaggtcgtgttgttggtcaagacccaaatgttaagcaaggtgcttacaataatcgttgggtgaaagactatgcaacagctttagctaaagaattgaatggtcaaattttagcacgccaccaaggtatgatgcttcctggcggtgttacaattgatgggcagcgcttaatagaagaagctcgattagaaaaagaagcactgcgcgaagaattatacttacttgaccctccatttggaattttggtaggttaatatggctacttatgataaaaatctttttgctaaattggaaaaccgcacaggttattctcagaccaatgaaactgaaatattaaatccttatgtaaatttcaatcattataaaaacagccaaatattagctgatgtattagtagctgaaagcattcaaatgcgaggggtagaatgctattatgttccaagagagtatgtttcccctgatttggtattcggcgaagacttaaaaaataaatttactaaagcttggaaatttgctgcgtatttaaattcatttgaaggatatgaaggagctaaatcgttctttagtaactttggtatgcaagtacaagacgaagtgactttatctattaacccaaatttatttaagcatcaagttaatggaaaagaaccgaaagaaggcgatttgatatattttcctatggataacagcttatttgaaatcaactgggttgaaccatatgacccattttatcaattaggccaaaacgctattcgtaaaattacagcaggtaaattcatttattctggagaagaaattaatccagttctacagaaaaatgaaggaattaacattccagaatttagtgaattagaactaaatcctgttcgcaatcttaacggtattcatgatattaatattgatcagtatgctgaagtagatcaaattaattctgaagctaaagaatacgttgaaccttatgttgttgtcaataacagaggcaaatcttttgaatctagcccatttgataatgatttcatggattaataaatattataaactaattaaagcccagattaggagaaatcatgtttggttatttttataattcgtcttttagacgatatgctaccttgatgggcgatttgttttcaaatatccaaatcaaacgtcagttagaatctggtgataagtttatacgtgttcctattacgtatgcatcaaaggaacacttcatgatgaaattgaataaatggacatcgataaattcacaagaagatgtagctaaagttgaaactattctacctcgtataaatttacatttagttgattttagctataatgctccatttaaaacaaacattttaaatcagaatttactacaaaaaggcgcaacttcagtagtatcgcagtataatccatctcctattaaaatgatttatgaattgagtatctttactcgctacgaagatgatatgtttcaaatagttgaacagattcttccatattttcaacctcattttaatacaactatgtacgagcagtttggaaatgatattccatttaaaagggatattaaaattgtactgatgtctgctgctatagacgaagctatagacggggataatttatctcgtcgtagaattgaatggtcactaacatttgaagtaaacggatggatgtatcctccagtagatgatgcagaaggattaattcgtactacttatacagattttcatgctaatacaagagatttgcctgatggcgaaggcgtttttgaatctgttgataatgaagttgttcctcgagatattgacccagaagactgggatggaacagtaaaacaaactttcactagtaatgtaaatagaccaacaccgccagaacctcctggcccaagaacatagaggttattatggaaggtcttgatataaacaaacttttagatatttctgacctccccggaattgacggggaggaaattaaagtatatgaacctctgcaattagtagaagttaaaagcaatccacaaaaccgtactcctgacttagaagatgattatggagtagttcgtcgaaatatgcattttcaacaacaaatgctaatggacgcggccaagatttttcttgagacagcaaagaatgctgattctcctcgtcacatggaagtatttgcaactcttatggggcaaatgactacgacgaacagagaaatactgaagcttcataaagatatgaaagacattacatctgagcaggttggcaccaaaggagctgttcctacaggtcaaatgaatattcagaatgcgacagtattcatgggttcaccaacagaattaatggacgaaattggtgatgcttacgaagctcaagaagctcgtgagaaggtgataaatggaacaaccgattaatgcattaaatgatttccatccgttaaatgaagctggaaaaattttaataaaacacccaagcttagcggaaagaaaagatgaagatggaattcattggataaaatctcagtgggatggaaaatggtatcctgaaaaattcagtgattatcttcgtctacacaaaatagtaaaaattccaaataattctgataggcctgaattatttcaaacttataaagataagaataataaaagatctcggtatatgggtcttcctaacttgaaacgagctaatattaaaacacagtggactcgtgaaatggttgaggagtggaaaaaatgccgagacgatattgtttattttgcagaaacatactgtgctattactcatattgactatggtgtcataaaggttcaattacgtgactatcagcgtgatatgctcaaaataatgtcatctaaacgtatgactgtttgtaatttatcacgccagcttggtaaaacaactgtagtagctatttttcttgcacactttgtatgttttaacaaggataaagctgtaggtattcttgcgcacaaaggctcaatgtctgcggaagttttagatcgtactaagcaagcaattgaattgcttcctgactttttacaaccaggaattgttgaatggaataagggttcaattgaacttgataatggttcctcaattggagcctatgcttcctctcctgacgcagttcgtggtaactcgttcgcaatgatttacattgacgaatgcgcatttattccaaacttccatgattcctggcttgctattcagccagtaatttcatctggtcgtcgttcgaaaattattattactacgactcctaatggattaaatcatttttatgatatttggactgcagccgttgaaggtaaatctggatttgaaccatatactgctatttggaattcagttaaagaacgtctttataatgatgaagatatttttgacgatggatggcaatggagcatacaaaccattaatggttctactttagctcaatttcgtcaagaacacactgcagcgtttgaagggacttctggtacattaatttcaggaatgaaattagctattatggatttcattgaagtaactccagatgatcatggttttcatcgatttaaaagccctgaaccagatagaaaatatattgcaactctagactgctcagaaggtcgtgggcaagattaccacgctttacatattattgatgttaccgatgatgtgtgggagcaggttggtgttttacactcaaacactatttctcatttaattctacctgacatcgttatgcgttatttagtagaatacaatgaatgcccagtttatattgaattaaatagtactggtgtgtcagttgcgaaatcactttatatggatttagaatacgaaggtgttatttgcgattcatatactgatttaggaatgaagcaaactaaacgaacgaaagcagtaggatgctctacattaaaagaccttattgaaaaagataagcttattattcatcaccgtgcaactattcaagagtttagaacgtttagtgaaaaaggtgtgtcttgggcggctgaagaaggttatcatgacgatttagtaatgtctttagtaatttttggatggttatcaacacaatcaaaatttattgattatgctgacaaagatgacatgcgactagcatctgaagtgttttcaaaagaactccaagatatgggtgatgaatacgctccagtcatatttgttgattcggttcattctgctgagtatgttccagtatctcatggtatgtcaatggtataaatatattaaagcatattaaagaggattaaaaatgactttattatctccgggcattgagctcaaagaaactacggttcaaagcaccgtggttaataactctactggtacagcagctttggccggtaaattccagtggggtcctgcttttcagattaaacaggttacaaatgaagtagatttagttaatacttttggtcaaccaaccgctgaaactgctgactattttatgtctgcgatgaatttcttgcagtacggaaatgacttacgagtagttcgtgctgttgatagagataccgctaaaaactcatctccgattgctggtaatattgaatacacaatttctaccccaggtagtaactatgcggttggagataaaatcacggtcaaatatgtttcagatgatattgaaactgaaggtaaaattactgaagtagacgcagatggaaaaattaagaaaattaatattcctactgcaaaaattatcgctaaagcgaaagaagtcggtgaatatccggaattaggttctaactggactgcggaaatttcttcgtcttcctctggtttagctgcagtaataactcttggaaaaattattactgattctggtattttattagctgaaattgaaaatgctgaagctgctatgacagcggttgactttcaagcaaatctcgaaaaatacggaattccaggagtagtagctctttatccaggcgaattaggcgataaaattgaaattgaaatcgtatctaaagctgactatgcaaaaggagcttctgcattactcccaatttatccaggtggtggtactcgtgcatctactgccaaagcagtgtttggatatggaccgcaaactgattcacagtacgctattatagttcgtcgtaatgatgctattgttcaaagcgttgttctttcaactaagcgtggtgaaaaagatatttacgatagtaacatctatatcgatgactttttcgcaaaaggtggttcagaatatatttttgcaactgcacaaaactggccagaaggcttctctggaattttaactctgtctggtggattatcatcaaatgctgaagtaacagcaggagatttgatggaagcttgggacttctttgctgaccgtgaatctgtagatgttcaattgtttattgctggttcttgtgccggtgaatctcttgaaacagcatctactgtacaaaaacatgttgtttcaattggtgatgctcgccaagattgcttagtactgtgctcaccaccgcgtgaaactgtagttggaattcctgtaactcgtgctgttgataacttagtcaactggagaacggcagcaggttcatacactgataataactttaatatcagttcaacctacgcagcaattgatggtaactacaagtatcagtatgacaaatataatgatgtaaatcgttgggttccattagcagctgatattgctggtttatgcgcgagaaccgataacgtttctcagacttggatgtctccagctggttataatcgcggccagattcttaacgttattaaacttgctattgaaactcgccaggcgcagcgcgatcgtttataccaagaagctatcaacccggtaactggtacaggtggtgatggttacgtattgtatggtgataaaacagctacttctgttccttctccgtttgatcgtattaacgttcgtcgtctgtttaatatgttgaaaacgaatatcggacgtagttcaaaatatcgtttgttcgaattaaacaatgcgtttactcgttcatcattccgcacagaaactgcccagtacttacagggaattaaagctctcggtggaatttatgaatatcgtgtagtttgcgatacaacaaataacactccgtcagtaattgatagaaatgagtttgttgcaacattctacatccaaccggctcgtagtataaattatatccaacttaatttcgtcgcaactgctaccggtgcagattttgatgagttaactggtcttgcaggttaattgattatggggcttcggcccctattctcgaggaaacaagtgattatttctaagtttgttacaataaaaccaagaaatcattcaaaaatgtggtcgacaattctgggatataaagtatcatatcatgatacagtatctgttccaatagaattaatgccaaagaatagtaataaaatagttgacgctaaatgtgatttgtgtggtactaaatttagtagaagcattcaacttttaaatagaacacccacacatgcatgtagaaaatgtagcattaaacaagttgctattaaaaattcggaagttcaatctggaataagcagaccatggcaaagaggtgataaacatcctcgatggactggcaaaagaaaagagtttgcattatatgctagtagagttcattctataactaagtcagctaaaataagaaaaatctggtcaaaatggccgaatgctgataaaataggaatgtgcggcgtagaaggtgcttatcaactcgatcataaagtatctatcaaatatggatttgataatttaattccgccggaaattatagcaagtgtaaaaaatttagaaataatcacttgggaatctaaccgagaaaagtcaaaaagaaatagcgtagatctttgggatttactagaatgattctaaaggcctgtttcggcaggccatataaatacactatatccttaattctttaattctatatgccctaggttaaacatagggatataaatactacagaggctaatatgtttgtagatgatgtaacacgagcgtttgaatctggtgattttgctcgacctaacttattccaagtagaaatttcttatcttggacaaaattttacgtttcaatgtaaagccactgctttaccagctggtattgtagaaaaaattccagtcggatttatgaaccgtaaaattaacgtagcaggcgatcgtacattcgatgactggactgttacagtaatgaacgatgaggcacatgatgctcgccagaagtttgttgattggcaaagcattgccgcaggacaagggaacgaaattactggtggaaaaccagcagagtataaaaagagcgctgttgttcgccaatatgctcgtgatgctaaaactgtaacaaaagaagtcgaaattaaaggcctgtggcctactaacgtgggtgaacttcaattagattgggattcaaacaatgaaatccaaacctttgaagtaactcttgctctcgattattgggaataaaatgaatggggagaaatccccatcctgcttaaagcagagaagtccattataaatataactataattcccatttggagaatacaatgaaatttaatgtattaagtttgtttgctccatgggctaaaatggacgaacgaaattttaaagaccaagaaaaagaagatcttgtttccattacagccccaaagcttgatgatggagcaaaagaatttgaagtaagctcgaacgaagctgcttctccttataatgctgcattccaaacaatttttggttcatatgaaccaggaatgaaaactactcgtgagcttattgatacatatcgtaatctcatgaataactatgaagtcgataatgcagtttcagaaatcgtttcagacgctatcgtctatgaagatgatactgaagtcgtagcgttaaatttggataaatctaaatttagcccaaaaattaaaaatatgatgttagatgaatttagtgatatattaaatcatctatcgtttcaacgaaaaggttctgatcattttagacgttggtatgtcgattcaagaattttctttcataaaattattgatccaaaacgtccaaaagaaggcataaaggaattacgtagattagaccctcgccaagttcagtatgttcgtgaaattataacagaaactgaagctggcacaaaaatagttaaaggttacaaagaatattttatatatgatactgcccatgagtcatatgcatgtgatggtagaatgtatgaagctggcacaaaaataaaaattcctaaagctgccgtcgtttatgcccattctggattagtcgattgttgcggtaaaaatatcatcgggtatttgcatcgtgctgttaaacctgctaaccaattaaaattattagaagatgctgtagtcatttatcgcattactcgtgctcctgaccgccgtgtttggtatgtagacacaggtaatatgcctgctcgtaaagctgctgagcacatgcaacatgttatgaacacgatgaaaaaccgagtagtatatgatgcatcaaccggtaaaataaaaaatcaacagcataatatgtctatgaccgaagactattggttgcagcgccgtgatggtaaagctgtgacagaagttgatactcttcctggtgctgataatactggcaatatggaagatattcgttggtttagacaatctctttatatggcattacgtgttcctctttcacgcattccgcaagaccaacaaggcggtgtgatgtttgattctggaactagcattacacgtgatgaattgacgtttgctaaatttattcgtgagttgcagcacaagtttgaagaagttttcctagatccgcttaaaacaaatcttttgcttaaaggtataatcacagaagatgagtggaatgatgaaataaataatattaagatagaatttcatcgggatagctactttgctgagctcaaagaagcagaaattttggaacgaagaattaatatgctaaccatggcagaaccatttattggtaaatatatttctcacagaactgctatgaaagatattttgcagatgactgatgaagaaatagaacaagaagccaagcaaattgaagaagagtctaaagaggctcgtttccaagaccccgaccaagaacaagaggatttttaatggaaggtttaattgaagctattaaatcaaacgacctcgtagccgctcgtaaattatttgctgaagccatggctgcaagaacgattgatttaattaaagaagaaaaaatcgctatcgctcgtaatttcttaatcgaaggtgaagaacctgatgacgaggatgatgacgaagacgaagacgaagatagtgatgataaagacgacaaaaaagacaaagactctgatgaagatgacgaagacgaggatgatgaataatgcttctgatccctgaaactcatgaattagttctcgagaatgtcgaagcacttattcctgaagcacagggtcgctttgacgaattgtcttctgctttaaataaagacgatataaatacaattgtcgagaatatgcttgatgatgaaactgatttagcggttgcattagcttctattaatgaaaatatgccgttaaatgaatttatcgttaaacatgtttccgcccgtggtgaaattactcgcactaaagaccgcaaaacgcgtgaacgtaatgcatttcaaaccactgggctgtctaaagcaaaacgtagacaaattgctcgtaaagctaccaaaacgaagattgccaatccagcaggtcaatctcgtgctcagcgtaagcgtaaaaaagctcttaaacgccgtaaagcattaggattaagctaatgaatgaaccccaattactaattgaaacttggggtcaacctggcgaaattattgatggcgtgccaatgcttgaatctcatgatggaaaagacttaggtttaaaaccgggtttatacatcgaaggaatattcatgcaagcggaagtcgtcaatagaaataaacgtctttatccaaaacgtatattagaaaaagcggtaaaagactatattaatgagcaagttttaactaaacaagctctcggagaattaaatcatcctccacgcgctaatgttgacccgatgcaagccgctatcattatagaagatatgtggtggaaaggaaatgacgtatacggacgagctcgtgttattgaaggtgaccatggtcctggagataaattagcagctaatattcgtgccggatggattccaggagtttcttctcgtggattaggttcattgactgacacaaataaaggttatcgtatcgtaaacgaaggattcaaattaactgtaggtgttgatgcagtatggggtccaagtgctccagatgcatgggtaactcctaaggaaattaccgaatcacagacggcggaagccgatacaagtgccgatgacgcctatatggctctcgcagaggccatgaaaaaaagcgttataaatattattatctaaacaacaggactacaaaatgcttaaagaacaactgattgccgaagcgcagaaaattgatgcttccgttgctcttgatagtattttcgaatcagttaatatttctccggaagcaaaagaaactttcggcactgtattcgaagctaccgtcaagcagcacgccgttaaattagctgaatctcatatcgctaaaattgctgaaaaagcagaagaagaagtagaaaaaaataaagaagaagcagaagaaaaagctgagaagaaaatcgctgagcaagcttctaaattccttgaccatcttgcaaaagaatggctcactgaaaataaattagcagtagataaaggcattaaagccgaactgtttgaatccatgcttggtggattgaaagagctcttcgttgaacacaacgttgttgttccagaagaatcagttgatgttgtagctgaaatggaagaagaactgcaagaacataaagaagaatcagctcgtctgttcgaagaactcaataagcgtgacgcatatatcaattatgtgcagcgtgaagtggcattgagcgaaagtactaaagatctgactgagtctcaaaaagaaaaagtctctgctctggtcgaaggtatggattattcagatgcattctcaagtaaattgagtgcaatcgtagaaatggtgaagaaatctaataaagatgaaagcactattactgagagtataaatactcctgatactgaagcagccggactgaatttcgtcactgaagctgtagaagataaatctgcacaaggtgcagaagatattgtaagtgtatatgcgaaagtcgcatctcgtttctaattttaaaggttaacacaaatgactatcaaaactaaagctgaacttttgaacaaatggaagccattactggaaggtgaaggtttaccggaaattgctaatagcaaacaagcgattatcgctaaaatctttgaaaaccaggaaaaagatttccagacagctccggaatataaagacgaaaaaattgctcaggcattcggttctttcttaacagaagctgaaattggtggtgaccacggttacaatgctaccaacatcgctgcaggtcagacttctggcgcagtaacccagattggcccggctgttatgggtatggtacgtcgtgctattcctaacctgattgctttcgatatttgcggtgttcagccgatgaacagcccgactggtcaggtattcgcactgcgcgcagtatatggtaaagacccaatcgcttccggcgctaaagaagcattccacccaatgtatggtccagatgcaatgttctctggtcagggtgctgctaagaaattcgctgctttgaaagcaagtgatactcttgaagtcggaactatttacactcacttcttccaggaaactggtacagtatatctgcaagctacagaagttaaacaaattgattcaggcgcatctgacgcagacaaattagatgctgaaattaagaaacaaatggaagcaggtgtactggtagaaatcgctgaaggtatggctacttctatcgctgaacttcaggaaggttttaacggttctaccgataacccatggaatgaaatgggcttccgtatcgataagcaagttatcgaagctaaatctcgtcagctgaaagctgcttactctattgaattagcacaagaccttcgcgctgttcatggtatggatgctgatgctgaactgtctggtattctggctaccgaaattatgctggaaatcaaccgtgaagttgttgattggattaactactctgctcaggttggtaaatctggtatgaccctgactccgggttctaaagctggtgtatttgacttccaggacccaatcgatattcgtggtgctcgctgggcgggtgaatcctttaaagctctgttgttccagattgacaaagaagcagttgaaattgctcgtcagaccggtcgtggtgaaggtaacttcattatcgcttcccgtaacgtagttaacgttctggcttcagttgataccggcatttcttatgctgcacaaggtctggctaccggctttaacactgatactaccaagtcagtatttgctggtgttctgggtggtaaataccgtgtatatatcgaccagtatgctaaacaggattatttcactgtaggttataaaggtccgaacgaaatggatgctggtatttactacgctccatatgtagctctgactccactgcgtggttctgatccgaagaacttccaaccggtaatggggttcaaaactcgttacggtatcggtatcaacccatttgcagaatccgctgctcaggctccggcttctcgcattcagagtggtatgccttctatcctgaacagccttggtaagaacgcttactttagacgtgtatatgttaaaggtatctaatctttgacgatttaagggaccttcgggtccctttagttgtttttatggtataaataaatcatataaaccaaaaggaaagcgcaatggctaaaatcaacgaacttctgcgcgaatcaaccacaacgaatagcaactcaatcggtcgcccaaatctcgttgctttgactcgcgctaccactaaattaatatattctgacattgtagcaacgcaaagaactaatcaacctgttgctgctttttatggtatcaaataccttaacccagacaatgaatttacatttaaaactggtgctacttatgctggcgaagctggatatgtagaccgagaacaaatcacagaattaacagaagagtctaaattaactctcaataaaggcgatttattcaaatataataatatcgtttataaagtattagaagatacaccatttgctgatattgaagaaagcgatttagaattggctcttcagattgcaattgttcttttaaaggttcgtctattttctgacgcagcgtcaacaagcaaatttgaaagctctgatagtgaaattgcggatgctagattccagattaataaatggcaaaccgcagttaaatctcgcaaacttaaaactggtatcacagttgaattagcacaagatttagaagcaaatggattcgatgctcctaatttcttggaagatttgcttgcaactgaaatggcagatgaaatcaataaagatattctgcagtctttgattacagtatcaaaacgttataaagttacaggaattactgatactggattcattgatttgagttatgcatctgcacctgaagctggtcgttcattatatcgaatggtatgtgaaatggtttcacatatccaaaaagaatcaacttatacagcaacgttctgtgttgcttcagctcgtgctgctgcgattcttgctgcatcaggttggttaaaacataaaccagaagatgataaatatctttcacaaaatgcctatgggtttttagctaatggtttaccactttattgcgatactaacagcccattagattatgtaatcgttggcgtagtagaaaatatcggtgaaaaagaaattgttggatcaattttctatgctccgtatacagaaggtctcgacttagatgaccctgaacatgtaggtgcatttaaagttgttgttgatccagaaagcttacagccgtctatcggtttattagttagatatgctttatcagcaaatccttataccgtagcaaaagatgaaaaagaagcaagaataattgatggtggagacatggataaaatggcgggtcgttcagatttgtctgttttattaggtgttaaattaccaaaaattatcattgatgaataaaacaaagggacctttcggtccctttttatttaacttaccaattcaatccaagccggacgaagtacatcttgtaccattttaactaattcctttttaatcaaagaaggattatccgcttgagttagagtaataccttcacgagaagtttcttccaaaatatcttgaacagttagccccatcacctttccaaaatcctttggaccaatttcgccaattttagaaataacgttatttactcggtttagtgtaacgtaacaagctaaaatccccaccaatttgttatcagcttctgacagttcaactttagctttaataggcttatcagactttttcttttcactaaatttagaattcttgcatttgatggctacacgattgcgattaggcagccaagaaggataacaaggtttcaatacatatccttcagcggtaaatacttcgcctttggcttcagctttccaaacacatttgttagcgtcaattaaacctgcattatctacggtaaaattataagacggaacaacagaatccaaatcatttggaagtttaataagatcttcaaatttaccacgacccaaaagtggagcgattttaaacccaaatgaattacaaaacgattccatcatgtaatcatcaacataagttacatcaccactttcggtagtgacaataatgtcaaatacataaaaatctttatcgccataatcaacattcttctgaatgccaggtccagcgaattcgccaaaaacttgataagtcacaacagctgaagtttccataatatcttgtactgctttaatggaatcttcgtaattctttaaaataatttcataaccgaagaaatcttcagcaggaagaatcggtccagtacgtttagcgcaagttactttatcacgctcaataatcaatgagaaatttgtgccgtgaatcttttcacgagctacccattcgccgccagtcaatcctaagctataaagtttttcaataaatttagagttgtaatgattttcaagactgctatactttttaaacataattaatcctcaaaatgtaatttctaaccaatcaccatcacgctgatcactattaactttaaagatgaatccttcttttctcagccaatcaccaatttcttcagtaatcaatttatcacgagcagtacaataataactaaaatatgttttaccttgttcagctgctttattagcaagttccgaaaaatctttaataaaacactctagtttaaactgtttgcttttaagtgctttttcgcgtaatcgattagcaaaagattcattttcataaagatcatactgttccatttttcacctttttattgatatgtctttttctatagacaactttttctcgagtttcaaatttattcttagcagtcatagctcgagcccataatacagccacttcttttgcctgtaagtttaattcacgagcaatttcaatgaatgactttccagactcatgaagagtaaacaccacaacctcagttctcataatcaatctcatgttatcgagttggtgccattatatacatcattttctgattgtgttttgtgtgctttcaaaatgaagaaaggggccgaagccccttatgattatggataggtatagatgataccagtttctaaagcagttttatgaatgatgtatccattacgcgattcttggacatcaacttctggatagtctttcatcatcttctgaagagtgtaacgatgcaggtagtatttactatctggatcgtcagttttccaatctttaccttcttcggtcattttttggatttcatccataacccaccaaccgcaccagatgtaagctgaagtgcgatgtggaagaggatgaacataaggcaattcaccttctggttctggagcaactttatcagttacctgaacttgaccttctgctgtgatagttttgctatcataatcagtagcagtaacagttgcagtaacttcaatagtttgacttccaatagatgatgtatcaacagtgtatacattagttgacccttctactggagaagaatctttcttccatgaatattcgatttgtgcttcttctggagcatccgtaacattagcagtaaatgtagccgaagcatcttgctgaacgttaatagaaggaggagtcaatgtaacccgtggattcattgttttcttattaacagtcaatgatacttcattagaagtaacttccttttcattgtaattttcagcagttacttgggctacgcatttaattcttttaaccccacttgtagttggagtgtaattgaacgtagcattagtttctccaccaacttgtgaatcatctacataccactgatacgtagcagatgctcctagcggctgcgaagctaaggcagcagtaaattgaactggggttccaattactcctgctggaggactatcaggagttactgccaaagtagtcgtctgcgtctttttattaacagtcagtgatacttcattagaagtaacgcttagtgtatcataatctgccgcagttacttgagctacacacttgatttttttaactccgcttgtgtcaggagtgtaattgaatgtagcgtcagttgcttcgtctacaggagaaccgtcaacgtgccattgatacgtagcgtttgcacctgatggctgtgaagctaaggcagcggtaaattcaattggagttccaatcactccagcatcagggctaccaggagttacagctaaagtagttgtttgtgtcttattttgaactgtgatagttgtactaatttcagctgtttcaggttcagattctgcaacttgattggttgcaactactttaatagtcttttgaccggcaggtccttttagtacataactaaaagttgctgacgtttcttcctgtggagcgtcgtctacagtccaagcatatgtaataggtccatctccagtttgaccactgggtgtagcagtaaactgctgagtctgatctataactccagtaggtgttttaggagttatatcaactgtaaaagtcataagttatccttattttaatgttacgaaagaagaattgcgtgtttcacgaattaaaactgatccgtcacggttaatgtaataaattaagctaaataaagtttggtgtgctgacgcatgctcaaaactagttgggtgagatttccaatccggagtttcagcaatccactggtaaatccaccaaggaacggtgcagaatcctggattttttccaatcagctgaagattcggactaaagttttccggaagagtaaatacagacagcttttcagattcaataatctcagctacagcctgctcgaatttttcttcaacaaaaggagtatcttcaatcaaaacatcggtattttcaggaattttatccgtttctactacttcaattttaatgtcagatttaaccggagaatcaatcagaagtgctgcctctggattgacttcttcatcgtcatattttaacccctctgcagcatcagcagcatcaattaagtctttaatagataacccatcagtctctggcataggttcactagcgagcttctggagggcttcttcaatatcaacaacgatattatcaaaagatttattctttttgacctttataccaaactgctcagcatattcagctaatttagctttagcttctttgttatcatcaagagccttcagctctgcaatataatctttatctatcataatatttcctcagtataaatatagatatatttattacatggtatttagacatgactgacattaaagtacatttttatgattttagtcacgtgagaattgattgtgaagaaagtacatttcatgaactccgtgatttctttagctttgaagctgatgggtatcgttttaatccgaagtacagatatggccactgggatggacgaatccgtcttttagattataatcgccttcttccattcggcttggtcgggcaaattaaaaagttctgtgataactttggctataaagcctggattgacccgcaaattaacgaaaaagaagaattatcaagaaaagattttgatgaatggctttctaaattagaaatctattcaggaaataaaagaattgaaccgcactggtatcaaaaagatgcagtgttcgaaggattagttaatcgtcgtagaattcttaatcttccaacatctgcaggtaaatcgttaattcaagctctgcttgctcggtattatttggaaaattatgaaggtaaaattcttatcattgttccaacaactgctctgacaactcagatggctgatgacttcgttgactatcgtttattcagtcatgcaatgataaagaaaatcggcggtggagcatcaaaagatgataaatataaaaatgatgcaccagtcgttgttggtacatggcaaactgtagtaaaacaaccgaaagaatggttctcacagtttggaatgatgatgaatgatgaatgccatcttgctacaggaaaaagtatttcatctatcatatcaggtttaaataactgcatgtttaaatttggtctatcaggttcattacgtgacggcaaagccaatatcatgcagtatgttggaatgtttggtgaaatatttaagccagtaacgacctctaaattaatggaagatggacaagtaactgagttaaaaattaatagtatttttcttcgctatcccgatgagttcactactaaattaaagggaaaaacttaccaagaagaaataaaaattattactgggctcagtaaaagaaataaatggatcgctaaattagctattaagcttgcacaaaaagatgaaaacgcttttgtcatgtttaaacacgtatcgcacggtaaagctattttcgatttaattaaaaatgaatacgataaagtttattacgtatcaggggaagttgataccgaaacccgcaatataatgaaaaccttagctgaaaatggtaaaggaataattatagtagcgagttatggtgtattttctactggtatttcagttaaaaatctgcatcatgttgttttagcgcacggcgttaaatcaaaaatcattgtattacaaacaatcggtcgtgtattacgtaagcatggttctaagacaatagcaacagtctgggacctcatcgatgattgtggtgttaagccaaaatctgctaatacgaaaaagaaatacgttcatttgaactatcttttaaaacacggcattgatcgtattcagcgctacgcagatgaaaaatttaattacgtaatgaaaacagttaatttataagggcttcggccctttggagaaaaagatgttactagaatttaaacaatttctttatgaagcttctattgatgaatttatgggtaaaattgcctcttgtcaaacattagaaggtctagaagaacttgaagcttattacaagaaaagagttaaagaaactgaattaaaagatactgatgacatctctgtgagagatgctttggcaggaaaaagagctgaattagaagattcagacgatgaagtagaagaaagcttttaaattaaaaaaggcccaaccaaaaaggaagggccaaaactatagactaaaggtcacactatagcaaaagttgtgtttcatttaattgttcttccgaactttctgaaactggtagttctttaatgtaattatagcaaggcccaggatgtacaggacctttgtctgtttcaacaaccaatgcagaatcgattggagttttacagacaacacaaatcttatctgacatgattgtctcctctaaattatatatctatttatacaactctcatatgcatatcaatgcccatatctttagaataaaaatattcatcaagatatccagcaaattttcctttaatataaaggacatcttcaccgcacgggtggtcggccaggatacgaatatcctgacgcttaagattatgctttttcattaagaattgaatttccgtttcaaattcttcttcataattaaaagcatcatcaatgctatatctcattattttccagcctcaaatgcccgcatgtcttgaatatgcttaatagcaaatccgcgtgatttgatagcatcaagagctccgctacagaaatccaataaaattccccaatattgcaatgaagtatcaacttttaaaacatccttatcagctgatagaactgtcttcatttctgatttctcataacggtccatactaaattcatcaccatctcctcgtcccgagtagtagtctaatttagctttaagagcaacttttttctgtgcgtcaattctaagcatttcctttttaatacttgaatgcttattaagccatttactatataacatcacattattagctgcttcatactgtaatttagtcgaatctataaacacatctttcttcaattcttcttgaagatcttctaatttcatattgttctctattcaattgttattggatggacttagattcattataccacgtttatacgtgaagcattatactctgttactggaagccagttgtagttttatctgctcaatatcatcagggttatcgatgactgaaaagcgtatttctactatcagagtataatcatcataaactggtattacattaactgctaatttatcaatacgtggctcgtagtttcttactgcgctttcaatgttacgctcaacagtatcagcagtaagaggagtcatattctcaaaaagctgatcagataaatcgcatccaaattctgggtcaaatggccttgaccctttcctggttgtaataattcccaaaaggctatttttaattgaccttaatccaagagatctggaaacgtctttgtcccaatccattttcatttctgggtcaatgtcagaataaagcttattaatatttgccattacaatagctcaaagaattctttgagtcctcttattacatgagcgtgagtttttccacactctggacacttaattggaacagccaaataaacagtaggctttaaaagcatatcttttatagctacaatatctgactctgtgatgatagaatataaatcttccaactctttttcatttaagtcttcaattggaatgctttcaccgttagcatgaatcgtttctatacatgatactatcatgtgggctatatttttatcatcaaaaattttagggtaatggaacttaattttaatgtcacccagtgtataccagaggtcttctggcgcatctatttgtgtatgtaatagatttatatgggttggtatttcagttccacaggtgcacttccaggagttttcgtgattaacttctccaagagaatgcgcccataaatgaatcagcagtagttctgattcttggcggtttaaatcttttgcatttgtgcagtctttaattagctttttaacgatctcttctactgaaccgttctttttagcagtaataagttctagatattctttaagagtaaatgcgcgacagttgattattttagaaccaactctcacatcaaatttgtattcatacatatttagctcctttatttatcatatttataaatagaataaaaggagcatctatggcaaacattattcgttgtaaattaccagatggtgttcatcgttttaaaccatttacggtagaagattatcgagattttttgttagttcgaaacgatatagaacatcggtcaccacaagaacaaaaagaaataattgctgatttaattgccgattattttggagactatccgaagacttggcaaccatttatatttttgcaggtatttgtagggtcaataggtaaaactaaagtaccggtcacatttgtatgtccaaaatgtaaaaaagaaaagacagttccatttgaaatatatcaaaaagaattaaaggaacctgtttttgatgtagctaatgttaaaattaaattaaagtttccttctgagttttatgaaaataaagcaaagatgattactgaaaatattcattctgttcaagtagatgaaacatggtatgattggaaggaaattagcgaatcaagtcaaatagaacttgttgatgccatcgagatagaaacattagaaaaaattctcgatgcaatgaatcctattaatttaacattgcatatgtcatgctgtaataagtatgtaaaaaaatacactgatatagtagatgtgtttaagctattagttaacccagatgaaatatttactttttatcaaatcaatcacacgctcgtaaaaagtaattatagcttaaattcaataatgaaaatgattcctgccgagcgcggattcgtattaaaactgattgagaaggataaacaataatgagtatgttgcaacgcccaggatatccaaatctcagcgttaaattatttgatagctacgacgcttggagtaataatagatttgttgaattagctgctactattaccacattaactatgcgggattctctttatggccgaaatgaaggaatgctgcagttttatgattctaaaaatatccatacaaaaatggatggaaatgaaataattcagatttctgtagctaatgcaaacgatattaataatgttaaaacacgaatttatggatgtaagcatttttcagtgtcagtagattcaaagggtgataacatcattgctattgaattgggaactattcattctatagaaaatcttaaatttggcagaccgtttttctctgatgcaggtgaatctataaaggaaatgcttggtgtcatttatcaggatcgcacattattaactccagcaataaatgctataaatgcttatgttcctgatattccatggactagcacatttgaaaactatttgtcatatgtaagagaagttgctctagctgtaggaagcgacaaatttgtatttgtatggcaagacatcatgggcgttaacatgatggactatgatatgatgataaatcaagaaccatatccaatgattgttggcgagccatctttaataggtcaattcatccaagaattaaaatacccattagcatatgatttcgtttggttgactaaatcgaatcctcataaacgcgacccaatgaaaaatgctactatctatgctcattcatttttagattcttcattaccaatgattactacaggaaagggcgaaaactctattgtagtgtcaaggtcaggtgcttattctgaaatgacttataggaatggttatgaagaagctattcgtcttcagactatggcgcaatacgatggctatgctaaatgttctactgtcggtaattttaacttgactcctggcgttaaaattatttttaatgatagtaaaaaccaatttaaaacagaattttacgttgatgaagttatccatgaattatctaataataattcagtaactcatctatatatgttcactaatgcaacgaaactggaaacaatagacccagttaaggttaaaaatgaatttaaatctgatactaccactgaagaaagtagttcttccaataagcaataaagaagtttctattcctaaaatgggtcttaaacattataacattttaaaagatgttaaaggtcctgatgaaaatttaaaacttcttattgattctatttgtccgaatttatcaccggcagaagttgatttcgtttctattcatttattggaatttaatggaaagattaaatctcgtaaagaaatagatggttatacttatgacattaatgatgtttatgtgtgccaaagattagaatttcaataccaaggaaatacattttattttagaccgcctggaaaatttgaacaatttttaactgtgagcgatatgttatccaaatgcttgcttaaggtcaatgatgaagttaaagaaattaattttcttgagatgccagcattcgttttaaaatgggcaaatgatatttttacaactttagcaattcctggccctaatggtccaataactggaattggtaatattattggattatttgaatgaaaaagccacaagaaatgcaaacgatgcgtagaaaagttatttcagataataaaccaacacaggaagcggctaaatccgcttccaacactttatctgggcttaacgatatatctacgaaattggatgatgctcaagctgcttctgaattaattgctcaaactgtcgaagaaaaatcgaatgaaataattggagcaattgacaatgtagaaagcgcagtgagtgatactactgctggttctgagttaattgctgaaactgttgaaattggcaacaatattaataaagaaatcggtgaatcactcgggagcaaattagataaattaacaagtttattagaacaaaaaattcagacagctggaattcaacaaacaggaaccagtttagccacggttgaaagcgctattcctgttaaagttgttgaggatgatacagctgaatctgtgggtcctttattaccggcccctgaagcagttaataatgatcctgacgctgattttttccctacccctcagccagttgaacccaaacaagaatcgccagaagaaaaacagaaaaaagaagcatttaacttaaaattatctcaagctttagataaattaacgaagactgttgatttcggatttaaaaaatccatttcaattactgataaaatatcaagcatgttatttaagtacaccatcagtgctgctattgaagctgctaaaatgactgcaatgatattggctgttgttgttggaatagacctgttgatggttcattttaaatactggtcagataaattttcaaaagcctgggatttatttaatactgactttactaaattctctagcgaaaccggaacatggggtcctttattacagagcatctttgattctattgataaaattaaacaactttgggaagcgggagattggggtggattgacagcagctattgttgaaggactcggaagtgttctttttaatttaggtgaacttattcaattaggtatggctaaattatctgcagcaattcttcgagtcattcctggtatgaaggatactgctgatgaagtagaaggaagagcattagaaaatttccaaaattctactggagcatctctcaataaagaagaccaggaaaaagttgcaaattatcaagataaacgaatgaacggagaccttggtccgatagcaaaaggattagataaaattgctaattggaaaactcgtgcatctaattggattcgtggggttgataataaagaagcactaactaccgacgaagaacgtgcagcagaagaagaaaaattaaagcaactttcacctgaagaaagaaaaaatgctttaatgaaggctaatgaagcccgtgccgcaatgattcgctttgaaaaatatgctgattcagctgatatgagtaaagactcaacggttaaatctgttgaatctgcctatgaagaccttaaaaaacggatggatgacccggatttaaataattcaccggcagttaaaaaagaacttgctgctagattttctaaaattgatgctacttatcaagagctcaagaaaaatcagcctaatgccaaacctgaaacttctgctaaatcgccagaagcaaaacaagtccaggtaatagaaaagaacaaagcacagcaagctcctgttcaacaagcatctccttcaatcaacaatactaataatgttattaagaaaaatactgtcgttcataatatgacacctgtcacaagcacaactgctcctggtgtatttgatgcgactggggttaattaaggaataatatggcaattgttaaagaaataactgctgatttaattaaaaagtccggtgagaaaatttcagccggacagagtactaaatcagaagtaggaactaaaacatacacagcccagtttccaactgggcgtgctagtggtaatgacactacaggggacttccaggtaacagatctatataagaatggattattatttactgcatacaatatgtcatctagggattctggaagtcttagatcgatgagatctaactactcttcttcatcttcgagtattttacgtacagccagaaacactatcagtaatacagtatcaaaactgtcaaatggattaatatcagataataattcaggaacaataagtaaagcccctgttgcaaatattcttttaccaagatctaaatccgatgttgatacatcatcacatagatttaatgatgttcaagaaagtcttatcagcagaggcggaggtactgctactggtgtgctaagtaatattgcttcaactgcagtatttggagcactggaaagtataacacaaggtataatggctgataataatgaacaaatatacactacggctcgaagtatgtatggtggtgctgaaaatagaactaaagtgtttacttgggatttgactccacgttcaacagaagatttaatggctattattaatatctatcaatattttaactatttttcttatggtgaaactggtaaatctcaatatgctgctgaaataaaggggtatttagatgattggtatcgttctacgttaattgaacctttatctccggaagacgcagctaaaaataaaacactatttgagaaaatgacatcgagtttaactaacgttctagtagtttcaaacccgacaatttggatggtgaaaaactttggtgcaacatctaagtttgatggaaaaacggaaatatttggcccatgccaaatacaaagcatcagatttgataaaacacctaatggtaactttaacggattagctattgctccaaacctccctagtacatttactcttgagattactatgagagaaattatcacgttaaaccgtgcttctttatatgcggggactttttaatgtattctttagaggaatttaataatcaagcaataaacgcagatttccaacgtaataatatgtttagctgcgtttttgcgacaactccatcaactaaaagctcttcgttgataagttcaattagcaacttttcttataataacttgggcctaaattcagattggttaggattgactcaaggtgatattaatcagggaattaccacgctaattactgctggcacacaaaaactgataagaaaatcaggggttagtaaatatcttattggtgccatgagtcaacgtacagttcaaagtttattaggctcatttacagttggtacatatttaattgacttctttaacatggcatataactcatctggattgatgatatattctgtaaaaatgccagagaatagattatcctatgaaactgactggaactacaattctcctaatattcgcataaccgggagagaattagaccctttggttatttcatttagaatggattcagaagcttgtaactatcgtgcaatgcaagactgggttaactccgttcaagacccagtaactggattacgcgctttaccgcaagatgtcgaggcagatattcaggttaatcttcattctcgtaatggattgcctcatactgcggtgatgttcaccggatgcattccagtgtcagtgagcgctcctgagttatcatatgatggagataaccaaataactacatttgatgttacttttgcgtatagagtgatgcaggctggagcagttgataggcaagctgcgcttgaatggcttgaatctgctgctataaatggtattcaaagcgttctcggaaatagtggaggtgttactggactatctaattcgctttcacgactcagtagattagggggaactgcaggaagcatttcaaacattaatactatgacaggaattgtcaattcgcaaagtaaaatattaggagcaatataacaatggggaccgaaaggtccccatatttttatttacggaatgaaataaaagcagcaactgaagcaactaaactgtcttcaatataaacctcaatttttaccggagcttctgactcaaatttacctgttactacaccttggaaaatactttcagtctgttctggctttgaaaaattttcagaaggaaaaattccgaactttttatctgttccaaaaattttgataaattcatcgtaaactgcttcattaaaagcattatcagcaggaataacgccttcaactacaagttcttgacctaaaaagcgcaaagaagatttcattttgtgttcctcatgttatgtcagtaagactactataacacaacacgagggacttgtaaactacattttgaactttttagacattccgttgatgttaaccaaagaagccaagatttgagaaacttcgttttcctcttcttttgattcttctacaaggaattgattaaatccagccattggacgaacttcaccagtttccattagatggtcgccatcatataccgattcctctaattgttcagaaggaggaacgattgtaccttctattagatacttgttataagcagtttctttcataaagtacgtgctcactttattaatcttcagtaaaattccacgcggtagaataacttcagcttctgatggaaatcctgataaatgacctggaacgataactttgattcgctcagctcctttaattaccatacccacgctagtttcagcatcttcattagcatatgtagaatgactacccatatgcatcaaatcttctgcatcaacggaaccttctccttcgccagaaaatactgcgccggaatcatctagagccatatagtttttaccatgctcaccgaagatatttggtttaagcgatgtggatacgaagttcttgaaatagaacattttattttcaatgttatgacgcaaagttttaaaggtaacttcttgtccacggtaaagtgtagttcctggaggaagaactgaacctttagcgaatgcagaatcaagcgtctcaatatgtttaatagctcgttccatatattcttcacgggtagaatctggtttacccaaaaggaacgagttcatttcaacatatgaatctgcacaataatcttcaattacatcagactcagcctgagttaatccttttggagttacttcagtacttgcatattcatatgcctgagcggcagattcattaatcaatttataaatgccattcatgacaaattgaataatagctgtcttttcatctggtgtagctttagaacctttaactaaatcattgataattttcttaataacatcaaagctattagaaatattaatgtcagcaagatcgcttaaaattttatcagttttataatcaaagaattctttattctttaaatattcttgagaaccttgatatgttatatcgctctgcagcttgatagatggatcgcgtaaacgtgcatgggccaatgcaatatgatttcggaagttttctagttcataatcgttagatttaaaacgagaagcacttctcataccaccgatagctcctttgctaaagtttgaaccaatctgaataacgccagagttcatcggaccttctgctttatataccggaactttagattcaaactcttgatatttcttagcagcgaagctatcaccctgaagtgaagcatcaacagtagaatattgagcttgtgctgctaatcgacgactaattttagttttctgaataacagcttgatccgtgcgcttatcattttctaaagcaatagaagcagcaacagcgacagctttaggaacagcattacctgttttaacgtctacataaacatcaccaacctttgattcaacttttgtgaataactcagttgaaataggaggtacacctggaatgtcttctaaattggcatttttacggtaaaccataatatatgcatatttcttatcatagtcccagatttcctttaaaagaacatatcgacctgctcctttagtacgtactaaacggtcagcaataacttgcatttgacgagctgcgccatttgttttactctttagtacgcggaataagcatgcatcaattttatactgtttcattgtttgaagagcagtatcaaaaacagcattaatgacgccaattggatttccacccaagtttttaagcttaactaatgatagtttctcattaacacctatcattacgatatgcatcattttgtcgcctggcttaacgtttttattcgtatcaccgccagaggtgtatgtacaaaatctaaatccaggaagcacgctttcttcaccggcttgaatagcaaaaatttgtggtattttatgcttaggatttaagttaacaaccggcgccgaagcgccgtcaaataattctgtaataagttccatgatttatccttgaacgaacttgtaaggcatgtttgtaatatctatgcaagacgcaataattccaagagatgattctactttctgtttaacgtttgatgaaacaaatgatgcaaagtcaactctgtcttctatttcaatatcacctgtcattgcaaccaattcaccagtttccattaaatggtctccatcatagattaccgattcggtgagctcttccgtagtcataacttcagcttgaatgagttttgtattattagatgttgttccgtcattattagaagcatcagttattttattaactttgaccatcaatccacgcggtagaataacttcagcttctgttgctattccgagacttcctggatatacaacattaactttatgagctccatcaattgcccatcctatttgaactttaacgtattcaggattttctttatacgctcttatttcgtttggattaatagttattccttcttcatttttatcaactgttaattcattgcgagcttctggttctaaaagaccaataccagcatgtgtaattccaaaacgtccaaaaatgataggagttaaagaagtagatacaaaatttctgaagtagaacactttatttttaactaacgcttcatatataggagcagtcatactttgagcacgataaactgtaatgccttctggtatacggtcaccattttcaaaagctgaatctaagttatttatagcagattcaatttctttttcactcattacatcatatcgttctggattgtaacgacctaaaagaagattattgatgtcagtatatcctgaaccgcaatattctctaatgccacgcttttgtgatggagtatatttagaaccatcgcgggcaatagtaatatcaatcattggaccagcaccaattccagaaaaactgtaaatcattcgtttgaggaatttagtttttgctgcgttccaggaatttttagttatttcttcccagacttcatctggttgtcctttacgatttttattatgattagcaagccatttatctttataatcttcaaagaattgatttatagctgctgcgtatttctctaaacattttattgaagtagttggttcatttttaattgcattaaaaattacttctttaattttttctgaaacttcaccgacttgactcattggaaagaatttataatcatagtgaagttcatctgccgttccttcagcaataatttttgctgcctttgttttagaagctaatgaattaattccaattttcatttcttctgcttcgggaattaaaggtgcagtagctggtttattaaaattagctgctgtagattcatacttctggaataattcactttcaaatctagaagattccaatgactggctttgtgcaattgctctacgggaaattttaactttaacgattacagcttggtcagaacgtttatcattttcttgcgcaatagatgctgcaattgcttcatttttggttacttgagctccagtatctttattaatataaacatcaccgaccttcgattcaaccttagtaaagagctcggtactaatttccggaacccctggaatgtcttctagtgatacatttttgcgatgtataagaatatatgcatactttttatcataatcccagagttccttaagaaggacgtatctgccacctgaacgactacggataagtctatcagcaataacttgaatttgtcgagcttggccagcagttttagacttaagaatacgaagcatacaagcatcaattttatattgacgcattgtttgcattgcaacagtaaaaactgaattgatataattaattgggcttggaccaagaccttttaatttagcaattgaacctttagcagttaatgtaaaaggaacaatatgcatcattttgtcgcccatttttaaatcacgattagtatcacctccagatgtataggtacataaacgaaagcctggttgttcaattgcatcatcaacatgaactgaaaaaatttgtggtattttcttctttggatttaagtttgtaatcggaagagtagtatcttcgtcaaataattctgtaatgagttccatcatatcctctctagtgtttattctatttataaaattaaaggcccgaaggcctttaataatctattggtaagagagtacgatatatttcaaactttggacctttttcataggcatcaaatgtttctgtgaatttattataagcatatgcatctataaattcaatcatgatttgtgatacagaagtagaaacatctccaccttctttttgagccacgacaattgtttctaagtaagctttcataaaccagttacctcatgaaaatcgccaaatacatcttcgaacgtattagctttagttttatcttcacgtaaacgaatcgcaatcggaagaaataatttaacgtaatcagtgcgaccatcagattttaaccaaccgttgcattcgcactctagaatttttccaatataataattttgattttccataatgcgagtacgatcaagttcatgcgattttacaccggctttatcttttaagcctgaaccagcatttactttaatttttccacactctgattcaagaacgaaaccacctgctttagtagggtctttacggtgaggataaattcctacaatttttaaatcaacatcaattacttctttaaatttatagagattttttgaacgagcattttcccataatccatcgatatttttgagaataataccttcaagaccttggtcaatatactttttgtaaattaccttagcttcatctaggttatttactacttggttttcaattaaaattactttatcatagcctgatgtcatttgttctagtttagaaaaacgtacatcatattttaaacgaaatgctggaagaccatatatttctactaatggaacatagtcccagacctgaaacttcatgcattgtgcttctttttcagaaatggttccctttaaagatttattggcgatgccattagatgcagtacgtgattcagctacttcggcgaattctttagctttactaatttcaggataagcatcaaaaagaaaatctaggccttctggttccttttcaacttgctcatggtataccaattcgccatcaattaacacaccttctggatgaatctggcgggcttcagcagtcattttgattaactcttccttaagaagatctaatcctagatattcattgccagctcgtgataaaagacgaacatcatctaattcatcacctctgacttcggcaaagcaccgagctccatcagcttttaattgggcaaaggctggaaatttgatattcttattaatgcctttttcatcataagaacttgccagcatttgaggttgttcaggaattaaacctggccaaactttatttgcaatagatactgatgcaccgcattcaaggtctcgcatcatcacccgacgcaaaacttcaacatcatcttttttaccatcggtgatgtatccagttaattcctcaatcgccgcatttccagtcaatttccgagtagctaacgtgaattcaatgaagtcaagcatatcggtaagagtcaacattccaaaactctgggtagcaataccaggtttaggccatttcttgatataatactgtaacccacgagaataagtcagacgatatactcgtttaagcaattcattatctttattcttttcaagaattgcttgcttctgcttagttgaaccaatagatgctatttcgttcagaattttaagaatcattgttcatcctttagagtttggtttacagctctattataaatcaattcatcattaagctcagtcaaagacctgtggtacgttgttctaactttatttccttgcatccagtgcttgacgtaaatgaaaccttgctctacacattttttaaaaattcgttcgtctttttgagctcggaattctggattgcatctaaaaaattgatttacgtgaccgtaatcacgtgtagtattaccttcattttcataaatagtgtgaacgacaaacattagaatgctccttggaaaatattatcaccactagtaggtctattatacaaatactctatgccaccaggtttaatatagttccatgtctgaaacggatgtgtctgatatggatgatatagatgattataaggattaaatccaggagttctccaggtagtgttccaaggaaaagaatcgtttttgatcatcttctcaattacatcttttataaatttttcactatcaaaactttctttattttccttcgatggaaaaagcttattctctacatcattccatgtataaactcgctgtgcagtttttggaatactgtcacgctctcctcgagccatccaataaactggaacatttaatatttcactcgcatgatcgcagtggtgagcgagatcgtcaatataacaaattacgttatatttctcttttgcctttttgaacaactcttcttttgaagaatcatgaccacacatcaatatttctgagaaggcaccaggaaaaagagcattcaaattaaattgacgattcagcaaagcatcaatagaatcacccaatgctgtaacagctacaaaattataatcttcttttaatttgttaattacacacagggcatctttatatggagacaagtaacgaataaaatctgaacgattgtatttttcaattaacttgacgccaagttcttcatcacaattaaagagtttaccaggagaaataaatttctcatcttggatcatttttaaaatatgttctaacggaagattatatttctgagcaaaataaggaaggcctgattgccagcttaaacatactccatcaatatcagtcaaaatagtaggcttcatagagagtctcttaataggtttaacacatcaataaattcagcttcggttagtattgtatcatcttttgttagaccactagccatgctgtgcttcaaaacttttccttttgaggcttgtaaggcatcacgaaaccccttgttttgaatcgctgcttcaaaatatgcatttgtatacaactctttccacgctggggagtatcttgaaaatggaactcccagccagaagagggtcccacggtcctgagctcttgcataagaccttccagcttgttgggcggcaagcccggataacccaaatatacgacgttgttgttcaacatttttcaccttgcacccttggaggaatccttcaagacctccaaattgaataccatccataacgaaaggccatttggcgaaattacttaatgcacatgatggccacctaaaattgcttctaatctctaactcagacattttcaatgcttataatttcaacatcagcccaatgaccatagcaaggaagacgaaattcaactggccagttagggtccttttctaatataatagacttaacttgtggttcttcatgttcatctgtatacggatttttatctgttactttatatgtgaccttaatgtactgaattccaaaaatcttattaattatattcatactaattcctttaatccatagataggagataattcatcacccatacgaaggtcttcatttccatctacccaggaaacaatataagcatcttttacttgaacatctcccaatttaaatgcaggtaaaaccttagaaattaatccaggtataccaactccctttaattcaacagtttgacctaaaaagaatttcattagaacctcatctgaaaaccatgcgatttaacattaccgccgccaatatcagaaatgttaatttcacgcgcaattgaagggtcaatgtcaatttcacgattaagtttagtgatagctaaagtatcgcggccatttacagtacggaactctaaagggcagactacattaacatagtttttaatcgattcactagtaggctgcaaatgagcaggaaggtctttaggtgccttagagaaaaccacttcacagaaatttttgcgggtatcaaaataagtagtcataaacatagtattttcctcagtaaggggccgaagcccctcattttattttaaatatcaaattcgttaagaactacatcaaagattgcttccagatgctcaggtttagctctgttactcagaatatgacgaatccaagttttaaccagaagcttgcgattaacgccattccagcaaggatgagtccctaaatcgcgttgacggaaatcatcatccagagcgattttaaagttggaaccttccattgtgattgaaaccgtaatgccattttcaaatcgcatataaacgtagttaggagtcatatactgttcaatttcgcatactgatccattttgatgtttccaaaggcaaatagtatcaatagaacctgcaataccattagaaacatatttacgttcaaagttgatgtagttcatttttattctccgagatgtttaattgcggtacaggtatataatatcatatcctgtaccaaagtaaacaattattttactactttccagtgctgcatgtcaagtttaccgacttttttcatcttctcaattaaacgttcggcacgttggcgagctgtaacataataccattcacctaattcattttgttcaatttttccaacgattactgtattcaattcataaatccaaccagtaaagaaattatgaacttgaattgtaaaggtgaaatctgttcccataccttctgctgtttctacttcaataatatcaccttcaactgccattaaaaaccacatagtttcatcatatttaccattgaagcatttagttttaactgcagcgttcagattaatcgttttcattttattctcctttgtttgtgtaagataatactatcacaaaggagctatactgtaaacaactttatgcaatctttggaaaataaaaaaggactcccgaaggagtcctcaacttatgctttctgcttaccaaaacgagaagcatcatctcgaagaaccgcacgtgctcggcgcatgatcttctcaacagtttgattgatacgagagttcgacccacgcttgtagccagcgcgtttagaatcaccaactttcttttcaactgctttctttgctttaacctgttttgccattataaattctcttttaaatgaaaatgcaggacttattggcattgcctgcgcaagccctcaaggggaacataggtttttggatatttaacgaccaggataaccataaacccgtcatcataccaccaagacttacacagataacacttttctgacgcatgatagtaacattcaagaggtacaccataaaactgccggggtcttaaaactataatgattcgcaaatcattaatcagacagttcgatggctcctcgattttagctcacactaaggcagtgaatctccaataaattacttcagtgttaccacaaagtgacgaactgcttttcgtgcagcagaagccaaaggcttagcatatttaagttcatctttttcctgaagctcagcagctaatgcagtttgagcaggattcagatgtttgaaataacgcaggatttcaagagcttcggcttcaacatcaatagatgcgccatagttttcgtgaccattattccatgcgtttcgttgcagttcaagagcgtgttgtaattgtttaatcatttaaaaattctcgttagagattaaaactcggtagttacgttcttctgaatttcatcttctttcgacagatctctcagttgtagactaccacatagaattgttcggttaacttattattccgacacccaattcatattattatttatatcacttataaagacacggaatagctttataatgacaggtaacgaatttttgtttaatttcttttggctgcttaagacccagagctacaaaaggatgcggaacgtttcgaatttgaccaactggaagagaagtcaaatcaccaacttcacaaaaaccttcaggaacatcaggaccgacagagtgaattacacacagttcaggaacttcaccttgaacacgtttaccgataataagtcctgattctgtaacttcttcatcaccggcttgtgcaggttcagaaactaaaataacatattcaccgacagcacgaattggtagctgttgtacttcagacatcgtttttcctttttgctaacagatgaattaataataacaaataattcttaaagcatttatttaccaataaattgaagcaaatgctcaactttcataccattaacagaaatcaatttgtcaatagaaaaacctcgccatgcaccaagttcaacatcaaatactggaatcatgtcagtagattctttccgagtagattcagtcaatttaccggtttgcatggttggcataaagtctgcatcacgagtacctttcatagtacgaatagtaccatcagacttttcaaaaactacgtttgaaacacccatggacaatttagttttcaaaatttcgcgaattgctactttctgctcagttgtcagtttcatttatttacctatcacagttttaatatgagttgttccacgttctttaagggtggaaagtaatttttggcatttttctaaatcagatttccaactatatggtctatcaatactagtccaatcagttttataatactgtttccatttagagaaaaaatatttcttatactctacagcaaatgagatgttctcgttagaataagaactaattgctgtgagctttaccaaacgaaatttcattattcaccacagaattcgttgatattttcccagtttaacttattcaagtttttcttaggaacattaaacacttcaatacctgcatttcgcagaatatcatcccagccaggtttatttttatcgtatgtttcgcaataaaccagctttttaataccagattgagctatcgcttttgcacaatctggacaaggagaaagtgttacatacatagtagcaccttcaatagaagaaccatttcgtgcagcaaacaaaattgcatttagttcagcatgaatttcatttttagacgaccattcagagtgagcgctacggtgttctttcgccaagacaaagcgatcagttgaaccaaatgatacgcattcaggcttatagccttggatgatagtatgtttaggtttattcagcaaccaaccttgctcagcggcataatcacaacagttcacacctcctgcgggtgaaccattatacccagtagaaataatacgtccattcttttcaattactgctcctaccttccaggagcaacattttgattcttgtgatactaaatatgcaatttgaagtactgtactcgctttcatttcataatcaccagataagcagatttagcagtttcaacacgataaatttcgtgacgaagtttagttatacttttaataacagaactaattatattctgcccatctttaaagcggtttttcttatcaataaaaattgcgccaaccatctttttgtgaagctcaactggatacttcgtcacaataatagcatcatatacggaaggatgaatactattcaccagagtgtcattcattaaagttattctaatgaactgagctgtttcagagtcaagcgctctatgatcgccagtatcattttcaagacaattatcaattatatcagttaaattcatcatagtacgccatacaccctttgtgcttcaactaatccatcaaaatccaatttgagatgtgttatttgatcaccatcacctggattcacaattactaatactgaacgaggagtttcggtaataacacgaaccgatgtttcaggaaatcgttcagaaaccttatttaccaattcctgtgcaaatagcttaactttttcttggaattctttaacagtaatcggtttttcacttagcagcattttgttttcctcatttgtttggtagagctataatatcacaactctaccgtaaagtaaactattaaattgctttgaattctgctgtctgcgattcaaaacgaatatcgcctttgataactagctcagcatcaagaccgaatacaacaatgatatgcgcggaacctggatacaacgtaattgcaatagaatccacctggtctggaagcaaagtgttcaatacatgagtcacttgagcatggattcgaagctcggctgcgttatcaagcttttcaaacatgttattagcgataatttggctaaacactacttctacgattttagagtaagtcggaaacatatttacctcacataattttcttcgagccaatcaataacatccaaagcgttatcaaaagttgaaccatctactttgtcttctgtttcataatcaagaacatctaagcctactcttccatcaacaataggccataaacaaaatagatatttcttttctttttcaattttatcacaaagtcgataaatcttttctatgttattcataagttttccatggtaaaggcagtttagttttctttactgttagttcaacaccaggattcttttctcttaatttaaggcattcctcccaagctctgatttcactagtgaatacacaaaattgcccattactagtaccaactaaaccactatttacaataataatagcccaagtttcatgatgccacgccattaaaaatctcccgagtcaacttgccagcattcaacaccgatgcggcgccacatttcaactacttgagttcggtcatcaatagctaatttcacgtcaaaatgcggtgcgatgtgtttccagaaaatttcttctttaactacatcatctttacgggtatcaccttgttcgcgttgacattgcataactaatggaacgccagcgatatcctcaacccatttacgggtcatacgataatatttcgttgggtcttcttcggttccactttcacggcctgaaacgactacgatgtaatatccttgcttatcgtacatcttagctagttcaacaatcataggattgataacatcagtatcacatttttcgaggtcataaggaccacgaccattcatttttgctagtgtgccatcaacatcaaaaataactgcttttggtttaccaggagtccctttatataccggaagaccgagatactctcgcatgcttttgtacattgaacgtaaaatatcaattggtactgctttagttccacgttttgagttacgtttaaccaattcagtccaaggaacatcaaacactttatattcaactttccagccgtattctttggcaaaagtttcccatgccaggcgccgttcgggattcaggttagtatctgaaatgattactcccttgacagaatcaccgccatacagaatatttttagctgtatcaaactgcataccagatacgatgccttctttctttttggtatacttatactcatcgcgttcttcatgtgccataatagattggcgatagtcatcacgattgatattataaaatccaggatttttagcaataaattcacgagcccaagtactcttacctgaaccaggacatccaacagtcaaaataatctttttcatcatttaattcctaagaaaacttcaagaatacgaatattatgctcacgccgccctttatataattcagctgttgattgattcaccgatttgctctgaacattagatgaaataaattttatcatgtgatttttaagctgatacatatcaagcccacgggcttttgcttcttttcgtagggctttaccagcatcatctaaagctttcgcagggtcttcatcatttaatactaccccacggtccaaatccatatatactgcaccattacatgcatcaatgtaacggtctgaacattcgatataacgttctaacagagttttcatttattatttctcaaccaatgattgaatataatcatgcaagtctttagatgctttaccccacttattttggtattcatttttaagattagcccgagattgagctaataaaacatcattagttggaggtaaagattctaatcgttgaatctggcgtccataaatcattgcagccatctcggattcataaatcaatcctttgagatgttcaaattgatgccatgaaatcatttgcatttatcctcttttagctcttgacgataataacatatcatagttttttggtcatgtacatatcgttttacatcattaagccaaatacgaaattcctgggaatcttcaaatggcataccgacccaagctttaccatcaataactttaacttgccaagatagtttagcttcatcatatgactttatttgtacaggccaattaggatgaactgtttctttctttacttctagaggctttgtcgaacaaccaactagaagaccaatagataatattactgctgatagtttaatcatttagaaaggtcctggatgtcttctgcgaacttgttgaaggagttgttgatttgtttttcaaccaatcctggcttatgagccaccacatccgccttctttgcgtctttgcgcagtttttcattttcacgctcaatagcagcaattgcctcacgatttttattattcatcgcatcaatataattatactgaattcgcaaattatttaatgctaaagcgttttcattggccgtttttgtaatttctacaacagacgtttctaatctttcaattttattttttaaaattaaagaagttccgcccaatgcaattacaattaatagcaagcctgctgtcgtattacttaattgcataaagttttaataacctctataatatcgtcttgagaaagaccgttaattaaaatatgatgttcagccggagatttagaaattttaaagcatgcctcaacatcttctgccatatctgatgcgctacgatttggattactaattccaagacgatgttttcccgtcaaaggattaacgatgatatagcatttacagttgttaatatgaacattaggttgagtctgattaatgaacacatcacaatcatatttcgcaagctgattttctaaaaagactttcatctcctcaactgcatcaggaagcatatcacgggcttgctcaagacgacgatttcgatattctttaatggtcgttttccgcttgacttgcttagctaaatctttcttaagatcggtgatatatccaactcgacgatttcctttgaatacagaaatcccatctgtagtatcaccgtatgcttcaacgaccatttcagtagtaataagttgtaaatccatcataaagtcctcatgttatgtcagtaagactactataacacaacacgagggacttgtaaacagcttagtatccttctgggataaattttttataatttttcaaaaaattctgttcgatttcacacataaccttctcttgactatcatacccttggtataggctcataatgataccgaacaggtgatccattccagcacctttagcaacaccttgcgcttccatcgcataagtctttctatctttaccacaatgcttattatgacagtcaagaactaaaaatagagctcggtctaagtacttcagataagtcgtttcaaatgcttcaatttttctatatgaatattcatcgtcagcgtacattgctttaagatcatctgatgcaccatcaataatagtcttaaacagtttttctggattatctaatgaactttttgtactatgaagagacacataccagtcagacttaattttaaaatgagaaccatctttcatcacagcaacatagccttcgatgttttctgcatttttagcttcttctatccatttagggctatcgacttcgaatcgttcaactagatatggacgaagagcagcatctttataaatatcatcgtatgaaatgtattcaccggtttcgttttcacgaatattcaataaaatgattttcatctcttgataagcaagaacgattctattagttggagcgacgaattcgaagttagcagtaaatccatcttcggctaattctttaagtctgtcgcgcaactggtgatgattaatattcatcaaaattccattagccattaaagcctgttcggatttgattgaaccctttgatttgaacagaatttcatcaccgtctaaataagttgataccaaagacccatcttcttttgttagaatgtaatcaacatcatttaaatcgatattcatcgtgaatggattttcatttaagttaaaaaacttttccatgggacgagaggcaattcttactggtttttctccatccatttcaaacatgattccacgacattccagtgcatctggaagtaaccaatcagaataagatgcataattatatgagaaaattctgtaagttcttccagatgcacttacatcatccgagtaaaaaaacttacgctgtgaatccttacatagttccattaaattgttaaaaagttcttgcattgtgtatcctcttttgtgttttgaatatagtaccacattccatgtggaagcatcattttttcttgtgttgaatattccaaggcgggttaaacagtttaatgaatagcggctcctctaggtcaatcgttgcgattgtcattgtacctaactcatttgtcatagaaagattaaaacattggcgggcgtaaaattcaactttgcttccttcctttagcgcagcatgaattaatgcagatttagtagaatcagacgttttgtctttacgattaatagcagttctataatagtttattcttttacgtaaatttttagtttttccaatataaacaagctcatcatttatggcaatagcataaattacgttatacttgtttggaatagataactgttttatacttccgttgtcgtctaattctagctcagtatatttaataaatgaatattctgttgcaatttctttcataataaaatgggccttgcggcccactccttaaaaatattttttaaaactcatcataactttatcatcaacatcattatcaatctgtgctacaaggtaagatgacagttctacttcttgcggcgcggattgaacattatcagaattaaggtattcacgaatccaaggatatggatgtttaaccggagcatcggtaattggacatggaagaccgcactgtttcatacgagatacagttaagtaatcaataaagctccacatgctatttgtatttaatccaggaacatcgccatctttaaataaatgaactgcccaatctttttcttggcggttaacttccatgaaaatatcaactgcttcttgttcacactcttgagcaattttaacccattcatcgccatcagtaccagattgaagttgacgaataatatattgggtgcctttaaggtgaagctgttcatcgcgtgcaatgaacttcataatcttggcattaccttccatgatttccatgttcttatggaagttaaaggtacatgcgaaagatacataaaaacgaatagcttccaatgcattgattacatgcaaacagaggtaaagagatttcattagctcacgcttccaatatgtctcatgctcaatagcatcttcaataacgtcttcgtctgcattaatttctttttggtattcgatatcagctttagcgttttcccaataacgagttttaatcagaacatcatcataataacgtccaatggattcagcacgtttcataatagcttcatctaatacaatttcatcaaataccttcgatggatcagtataaagatttcgcatgatatgagtatatgaacgactgtgaatagtttcactaaaagtccatgtagcaacccatgtatcaaggcttgggtctgaaattaatgacataagtacagcagatggcgcgcgaccctgaatgctatctaaaagtgattgatacttcaagttgttagtaaaaatattttgctgatactgaggaagcttgttaaattgcgcagcatccatcattaagtttacttcttcaggacgccagaaaaatgacaactgcttttcggttaaatcttcaaaaactttatgacgttgaatatcataacgcgcaataccaaggcctgaaccaaaaaacataggttcttttaaaacatcaactggatttgtattaaaaactgtgctcataaattttccacttagttaatagttggtgactcgtccgtgagtcaaattatatcataatttacaggatgaacaatcttcagcttttggagtttctatttcataatcatcagtaccagaaccatcacgggtattatgataatagaaattttttccgccaaaataccagaaatacaaaaggtcatcaatcattattgacattggaacctttccttttggaaaaatctgcgggtcataatatgtattcgctgaagctgattgacatacccatttaagcataatagctacttgcgtaagataaggtttattacctttcttagctaatttccacgtataatcatagaggtctatgttatgctcaatattgggcacgacttgattaaaggaaccctcttttgattctttaacagagactggtccacgtggaggctcgataccatttgtactattagaaacttgggaagatgactcacatggcataagtgctgataatgtgctattacggatgccaaagagcttaaggtcttcccgcagcgacgaccagtcacaaacgtattttggagctgcgatttggtcaatctttttattgtaccagtcgataggtaattcgcctcgagaccaacgagtgtctgaataatattcgcaaggtcctttttctttggcgagcttaatggatgctttaatgagtccatactgcaatctctcaaatagttcatgtgttaaatcgttagcgtcttcataagaagcaaaattacttgccagccaagctgcatagttagtaacacctacaccgagatttcgacgctttttagctttttctgcttcaggaactggatatccttggtaatctaaaagattatcaagagcacgaacttggacttctgctaattcattaattttatcttggtcttgccaatcgaagttatctaacacaaatgcagataacgtgcacaatccaatttcagcatcaggactattcacatcatttgttggaatagcaatttcacaacacaagttactctgacgaataggtgccttttcacgaataaatggagtatagttattcgtattatcaatgaactgtacataaatccttgctgttcctgagcgttcagtcatgagcaattcaaacagttcacgggctttaatgcgctttttacgaatattagggtctttttctgcggcttcgtataattcacggaaacggtcttggtctttaaaataagaataataaagctcgccacccatttcatgcggactgaacaaagtaatgtaatcattctttccgaatcgttccatcattaggtcattcagttgaacgccataatccatatgacggatacggttttcttctacacctttgttatttttcaaaacgagaagattttcaacttccaaatgccaaataggataataagcagtagcagcgccgccacgaattccaccctgtgagcatgatttaacagcagtctgaaaatgtttccaaaaaggaataacaccagtatggcgtacttcacctgtgccaatcttagaaccttcggcacgaatcataccaacgttaataccaattccagcgcgtttagagatatattcaacaattgaagcggaagccttattgatagacttcaatgaatcacctgcctcaataacaacgcatgaactaaactgtcgagtcggagtacgacatccagccataataggagttggcaatgaaatctgtcgagtagatactgcttcataaaaacgaataacatgttttaatctatcaacaggttcatcttgatgcaatgccattccaatagtcataaatgcaaactgcggagtttcataaatttgaccagtggttttatctttaacaagatatttttcttttaattgcatcgccccggaataagtaaattccatatcccgctcgtgcttaatttttgattctaaaaatgtaatttcttctgctgaatattttgacaataattcagggtcatatttaccttcatttacacagtaagaaatatggtcaataaatgaacgcggttcatactgcccataaacatgcttacgaagagcaaacattaaacagcgtgcagctacatattgataatcaggttcttcaaccgaaatagaattcgcagcggccttaatgacaatagtctgaatatcatcagttgtcattccatcacggagataagatttaatattttcatataattcataaggatctactgatgttccttcagctgcccaagataaaactttaataattttttgcgggtcaaagctctgagaaacaccactacttttgataacattaattaattgcataagtcctcaacttgaaaatcgtctttaaacaatcggttaactatatgagctattatatcaccatgacacggctttggtttacatgtgcatcctagcctcattccacgtaaaggctctaaatgtgctttagttatttctccggatttaattcgacgtataaaatcttttttgaataattcaatggcagcctcccggctgccagcatctttaccgacgtaatttccccaaaatgtaccgcggtgaatattaacatcaaagtcggatttgtatttattcactacccggcatagacggcccacgctggaataattcgtcatattgtttttccgttaatacagtaatatcatagtaacagtcagaagaagttttaactgtggaaattttattatcaaaatactcacgagtcattttatgagtatagtattttttaccataaatggtaataggctgttctggtcctggaacttctaactcgcttgggttaggaagtgtaaaaagaacggcaccagaagtatctttaaatcgtaaaatcatatatcctcgcaataataaaattacaccgccatctttcctttaataggagggtgtgattcatagttgttaagaacaaaattatgcggctttgcgaattgactcaaccaaaatacctgcgattctgtgtcccattcatcaaattcatctggaaattttaattgcaattcgcataaatccataggttcacgacgcaaaatttctttacattgctctacgtgattcatatagatatgagtattaccaccagaaaatatcaaatctccgggaataagattacacatcttagctacaatatgcgtcaaggcagcgtacgaggcaatgttgaatggcaagcccaagaaaacatctacacttctttggtaccactgcaaatccaaatagccattacgcacattaaactgatagaacatatgacaaggcggtaatgccatatatttaagttcagctggattccacgcagaaacaatttgacgcctatcattcggcagttttttaatacgatcaacaacttctataatttggtctacaccgccaaaatcacgccactgttttccataaattggaccaagttcaccactatggtatcctaaatcttttgcctgattttcgtaattttcatcccaaactgttttgccttggattaacgaatcgtgttgaattaatcgtaaatcattgacatttgtgcttcccgataaaaaccatattagctcagcaatacatgcattccaggcgagcttcttagttgttactgcaggaaaacctttggttaaatcccaacgcaatttagtaccgaacaaagcaattgttcctgtgcctgttcggtcatcggtttcataaccattttcaaaaatgtctttaattaaatcttggtattgtttcatttagtaccttatataaattataatacattttatgaagctaataattaatacggtttagcatcaaattttctctcaatttcaggcgtgaaatataattctttaccgcgtttggaaaaacgaccaataatatgataattattctcatcaaacgtgatattaccaatatccatagctttcaaccaaatatcgatatttctatctagttttatatcaaaattccaatacggagaactattaccaaaaatactacaagcggattcagtgaaacaactgctataaatcttgtctttaggaactactaattgatagacgcctttaataaactgaggaccctgccattttggttgtttcgcgtctttttctaatagaatagggtaataattaaaattcatattttccgccacgtgttatttcatttatatactgattccgtaagggttgttacttcatctattttataccaatgactttcaaccatttcacgtttgcttatatcatcaagaaaacttgcatctaattgaaccgttgaattaacacgatgccttttaacgatgcgagaaacaactacttcatctgcatagggtaatgcagcatataacagagcgggtccgccaattacactaacattagaattctggtcaagcatagtctcgaatggcgcgccagaaattgatacttgaatttcgtcgccagaaatgtaatctatatattgctcccaagtaatatagaaatgtgctaaatcgccgtctttagttacaggataatcgcgctcaaggtcacacactacaatatgtctacgacctgaaagtaatgtaggcaatgactggaacgttttagcacccataaacataattgtaccttcggtacgagctttaaaattctggaggtcctttttaactcgtccccatggtaacccatcacctaaaccgaatgctaattcattaaagccttcgaccgttttagttggagaataagcgaataccaatttaatcattacgcaaaacccctttcaagaaaccattcagtggctttattagcatcaaagaacatttcttcataggtcttttctttgttttcaaagactgtcacacaaacacgttgacttgctccacagtattcttctgacatactcaaagcatcagaaaacatttcattaaattcatttaaatcaggattatacaatgcattaaaaattgcataatcgaagtcatcattcataaattcaaatacaaaaatcatattatctcctattaaaaaggatcaggaatatatccgctagctttaatcattttaattaacgttagcattcctttattaaccgctagtgagatttcatcaaaaacttcatcactaaaaagttctaacacacccttctgaacttttaatttacagccaacaatttcgtcatcgcctatagtaaattcattaccaccaattcctccgaaaaacttaattacaccagttaactgtcttccacgagaatatgggtcgtgtgataaagtaatatgagtcaccccgggtacagttttaaattggcagcgaatatttacttgagcaattccagttacatgaatgtcagacataatattttcctcaaacagactttttcacaattttccaatcagctttaaactgctcgacgtcagaatggtaaatccaaaatcctgcgctttctccgtcttcataaagaggacatccatcgcattcatcttcccatcccatatcacgtaaaagatgttcagctttttcaacaagttcagaatctttaccgatgatattaaaataccatttacctctaacttccgaatctttgatgctctgacgttgtaatctcattttattctcctcagtagttgatagggtaatagtatcacactactaccctgatgtaaactactttttgaaagtttttcgcaaaagttcaatgatttcatctacattattttcgtctacaatgcagtgaatttttgttacgccagaaaccttgtcttcgacttcatcttcttcagaagtcggttctttatactcacgaaaacaatgaaattcgtcttcacaaacgttaaagtaaaaatgctttccatttgcgcattcaatgtgttttattactctaaatccatcaacaaagaaagcttctttaacttcaaaccatctaccattttcttgaataattttaactattgatgaattagaacgcgggcgataattaataaatgtatcaataagtcttggaacaagctcatactttttgccaatatacattacattttcctcattttaacggggctgtaatagccccttgataattattgttcaatcaatcccatgtaaaattctgtgtcttcagaatccatgccatcacaatattcattagccataaagcgggtgaggtcttcaagaggaccttcaatgacaatagaaaaattgcaataattgggatcatcgtgaatacttgtgatactaagttcaggataacgattacgaataatttcttcgatatattcaaaatcaacgatgtcaatatcaactttagccatattattttcctctttaatcatcagcagtattgccgatagttgtatagtaccatggaagaacagggatgtaaacagttttgtgaaaaaatttttgaaataaaaaaaggggaccctagaggtccccaattaattagtaatataatctattaaaggtcattcaaaaggtcatccaggtccgtgtcatcagcactagatgaactgccagagcttgagctcataaaatcatcttcagtttttgtattgaagtcatcaacattgaatgcatccaaatcatcagcaactttatcagctttcttagcagcagttgcagcagcaccgcccatcacagcagttcccataacttgaccgaatttagtgctcagttcttcaaacgatttgaatttatctttagaagtcatttcagaaaggtcaaccatttgttcgaacagttctttctggaaagattcatcgtcaatgtttggaatcgcagattgattcaggaatttagattcgtcgtagttactaaatccagaaacctgtttaactttcagtacaaagttagcaccttcccacggacaagttacatcaaccggtgtttcacccatttcaacatcaaccgcaatcatcgcgttgattttatcccagattttcttaccgaaacggtatttaaatactttaccttcattttctggagcagctgggtcttttacaacaagaatattagcccagtaagaagttttacgtttaacaagaccgtactctttattgtcagtgttgtacagatcatttttactgatgtattgacatactgggcaagaatcgtaatcaccgtgggtagatgaacaattttcgatataccatttaccgtttttcttgaaaccgtgatttacaagaattgcgaacggtgcttgttcatcatttttagacggaagaaaacgaattactgcttgaccgttacccgcattgtcgagtttcagtttccactcgcctttatcttcagaagaaaaaccacctttatttccagccagtttagccatttgtgcagcgagttcagcagtagatttacgtttaaacatttttatttccttttaatttaattaacagttggtgctatgacgatgtatgacctcatagctggtcagtgagataattataatctatttataataagcaattaatacttacaagatttcacagtttcaatgaaaacatttttagctttctgtgaatcaatatttaaaatttttctataagcctttaactttatagaataattattccagactaaattatcagtctgttcatcatgtttatcaattatatttaaaaatgaatcaagcaagataaacgtctcaaacgaaattatgttcgattgcagaagtttaaaaatataacttgactgaacctttggattatattcaaagatttctttaaaagcagaaacttcaacttttttactaaaataataaatgttgcgaatatcttcttcaaacttaaatttaatttgctttaagcgtccgatatattcacgataaaacacaagtgcatcagcgtcagagatgtcaccaatccaagcatcttggttagctacaagattgctaataaaaattaaagtcaattcttttaatttatacttttctgatagcttttggaaaaaatacttatcccttcgcttttgataagcggcatcagacacccgcatgcaccaattatacttaataacatcatactttccattcatatgttgttttatcattaagtataatttataaactgatttaccatcaatatatctttcaccaccagcaggcatgcggagtttaatcatagcagaaaatctaatgtattagttttttcacaacgaacaacagaaggacgtaaaagattttcgtcaatggcttctgactgaattttttcaattatacccgaaggaataaatttagcaaattgagtttcaggaatagaattttcttccaagaatgctgttgtagcttcaagataactcattccaaactcttctaccattttttcaataataaatccattttcttgacgatcaagaagctttgctatttcatccttttctttcttaattgaaagttctttttctgaaagaccggtctcatcgaccggacgaatatcatttagagaaaactgtgtcataaagttcaactacctcttcagtttcagcttcaaacacatcacggttatctttatgatacaaagctaatagacgattaaacatcttaccatcaacgccaagttcatctttagcacgaattcgaatatctttaatcagttcattataaccggaaattttcagtttatgatcagatgcttctttaataaatttagccaaatcttcgccgtggatagcttcatcaaattcaaccatttcttttttagccattattcacctcaaaattcattaatgctattagttaatttagaaagacccgcttttacaaaatatgaataaattttgccacgcggtggtaatttatatgaattatagtaattcacaatgtttgaagcaatattatcaggaatataatcaaaatcaattagaactaaattttctttataacgattatattcagattctgtgagaagcaccttagcttgctcacggtcattagcaatagcttcaacgattgaagttttcattgaaggagttcgttcaccttcaactctggtaaaccaaaagtcagatcgtactttaactgaagcaacgttatcctttttgtcgcctttaaggattttagtcatacagtcaatttcagcagaaccgcttttaattttaacccatttcttgtgcatcggtgaccattgcttaacatttggatatttgtgaagctgtgtaaagtcaccatccgatgaaatgattaaaatcttgtgtccttctaaagagaactttttaacaagaacagcaatgtggtcatctgcttcatacttatcaatatccataacaatgtatggcatataagctttcaattcatctataactttatggctggattcaaaataaccttcccagtcccaagtagattcttctcgtgcttttccacggtttttcttataataatacgcgaaatcacgacgccagtatccagatttcgcgttatcaatacacaatacaattttagtgtatccaagagtttttgcttttttgacattaaacttaattgagttcaatatcaaatgacgaaccattgataaattaattttttctttatctgggaagtttactaaagcagttgaaagcgcaatttgactaaagtcaataaagcaaattccttctttgtaatcttcatccaacatcatttctaaatccatatgaacctcgttcaattagtgagatttctattatataccatccaaatcttaaagtaaacaagtataaatacttattattgaaaacacaataggagcccgggagaatggccgagattaaaagaaagttcagagcagaagatggtctggacgcaggtggtgataaaataatcaacgtagctttagctgatcgtgccgtaggaactgacggtgttaacgttgattacttaattcaagaaaacacagttcaacaatacgatccaactcgtggatatttaaaagattttgtaatcatttatgataaccgcttttgggctgctataaatgatattccaaaaccggcaggagcttttaatagcggacgctggagagcattacgtaccgatgctaactggattacggtttcatctggttcatatcaattaaaatctggtgaagctatttcggttaacaccgcagctggtaatgatattacatttactttaccatctaccccaattgatggtgatactatcgttctccaagatattggaggaaaacccggagttaaccaagttttaattgtagctccagtgcaaagtattgtaaactttagaggtgaacaagtacgttcagtactaatgactcatccaaagtcacagctagttttaatttttagtaatcgtctgtggcaaatgtatgtagctgattatagtagagaagcggtaattgtaacaccagcaagtctctatcaggcgcaatctaatgattttatcgtacgtagatttacttctgctgcaccgataaatattaaacttccaagatttgctaatcacggcgatattattaatttcgtcgatttggataaattaaaccctctttatcatacaattgttacgacatacgatgaaacgacatcagtacaagaagatggaactcattccattgaaggccgtacatcgattgatggctttttaatgtatgatgataacgaaaaattatggagactgtttgacggggacagtaaagcacgtttacgtatcataacgactaattcaaacattcgtccaaacgaagaagttatggtatttggtgcgaataacggaacaattcaaacaattgagcttcagcttccaactaatatttctgttggtgatactgttaaaatttccatgaattacatgagaaaaggacaaacagttaaaatcaaagctgccggtgaagataaaattgcttcttcagttcaattgctgcaattcccaaaacgttcagagtatccgcctgaagctgagtgggttacagttcaagaattagtttttaacggtgaaactaattatgttccagttttacaacttgcttatatagaagattctgatggaaaatactgggttgtgcaacaaaatgttccaaccgtagaaagagtagactctttaaatgattctactagagcgagattaggcgtaatagctttagctacacaagctcaagctaatgtcgatttagaaaattctccacaaaaagaattagcaattactccagaaacattagctaaccgtactgctactgaaactcgtagaggtatcgcaagaatagcaactactgctcaagtgaatcagaacaccacattctcttttgctgatgaccttatcatcactcctaaaaagctgaatgaaagaactgctacagaaactcgcagaggtgtcgcagaaattgctacacaacaggaaactaatacaggtactgatgatacaaccatcattactcctaaaaagcttcaagctcgtcaaggttctgaatcattatctggtattgtaacttttgtatctactgcaggtgctactccagcttctagccgtgaattaaatggtacgaatgtttataataaaaacactaataatttagttgtttcgccaaaagctttggatcagtataaagctactccaacgcagcaaggtgcagtaattttagcagttgaaagtgaagtaattgctggacaaagccaagaaggatgggcaaatgcggttgtaacgccagaaacgttacataaaaagacatcaactgatggaagaattggtttaattgaaattgctacgcaaagtgaagttaatacaggaactgattatactcgtgcagtcactcctaaaactttaaatgaccgtagagcaactgaaagtttaagtggtatagctgaaattgctacacaagttgaattcgacgcaggcgtcgacgatactcgtatctctacaccattaaaaattaaaaccagatttaatagtactgatcgtacttctgttgttgctctatctggattagttgaatcaggaactctctgggaccattatacccttaatattcttgaagcaaatgagacgcaacgtggtacacttcgtgtagctacacaggtcgaagctgctgcaggaacattagataatgttttaataactcctaaaaaacttttaggtactaaatctactgaagcacaggaaggtgttattaaagttgcaacccagtctgaaactgtgactggaacgtcagcaaatactgctgtatctccaaaaaatttaaaatggattgtacagagtgaacctacttgggcagctactactgcgataagaggctttgttaaaacttcatctggttcaattacattcgttggtaatgatacagtcggttctacccaagatttagaactgtatgagaaaaatagctatgcagtatcaccatatgaattaaaccgtgtattagcaaattatttaccgttaaaagcaaaagctgctgatacaaatttattggatggtctagattcatctcaattcattcgtagggatattgcacagacagttaatggttcactaaccttaactcaacaaacgaatctgagtgcccctcttgtatcatctagtactgctacgtttggtggttcagtttcggcaaatagtacattaactatttctaatactggaacagcaactcgtctgatttttgaaaaaggacctcaaactggaactaacccagcacagacgatgactatcagagtatggggaaatcagtttggtggcggatcagatacaacacgttctactgtatttgaagttggtgatgaaacgtctaatcacttttattctcaacgtaataaagctgggaatataacgtttagtatcaatggtactgtaatgccaataaatgttaatgcttcgggttctttgaatgcgaatggcgtagcaacatttggtagttcagttacagccaatggtgaattcattagcaagtctgcaaatgctttcagagcaataaacggtgattatggattctttatcaggaatgatggcggcagcacatattttatgctcactgcatccggtgatcagactggcggatttaatggattacgtccattatcaattaataatcaatccggtcaagtcacaattggtgaaagcttaatcattgccaaaggtgctactataaattcaggcggtttaactgttaactcgagaattcgttctcagggtactaaaacatctgatttatatacccgtgcgccaacatctgatactgtaggattctggtcaattgatattaatgattcagctacttataaccagttcccgggttattttaaaatggttgaaaaaactaatgaagtgactggacttccgtacttagaacgtggcgaagaagttaaatctcctggtacactgacacagtttggtaacacacttgattcgctttaccaagattggattacttatccaacgacaccagaagcgcgtaccactcgctggacacgtacatggcagaaaaccaaaaactcttggtcgagttttgttcaggtatttgatggaggtaaccctcctcaaccatctgatatcggtgctttaccatctgataatgctacaatggggaatcttactattcgtgatttcttacgaattggtaatgttcgcattattcctgacccagtgaataaaactgttaaatttgaatgggttgaataagaggtattatggaaaaatttatggcagagtttggacaaggatatgtccaaacgccatttttatcggaaagcaattcagtaagatataaaataagcatagcgggttcttgcccgctttctacagcaggaccatacgttaaatttcaggataatcctgtaggaagtcaaacatttagcgcaggccttcatttaagagtttttgacccttccaccggagcattagttgatagtaaatcatattctttttcgacttcaaatgatactacatcagctgcctttgttagtttcatgaattctttgacgaataatcgaattgttgctatattaactaacggaaaggttaattttcctcctgaagtagtatcttggttaagaacagcaggaacgtctgcttttccatctgactctgtgttgtcaagattcgacgtatcatatgctgctttttatacttcttctaaaagagctattgcattagagcatgttaaactgagtaatagaaaaagcacagatgattatcaaactattttagatgttgtatttgacagtttagaagacgtcggagctaccgggtttccaagaagaacgtatgaaagcgttgagcaatttatgtcagcggttggtggaactaataacgaaattgcccgtctacctacagcatctgcaataagtaaattatctgattataatttaattcctggcgatgttctttatcttaaagctcagttatatgctgatgccgatttacttgctcttggaactacaaatatatctatccgtttttataatgcatcaaatggatatatttcctcgacacaagctgaatttaccggacaagctgggtcatgggaattaaaggaagattatgtagttgttccagaaaacgctgtaggatttacgatatatgcacaaagaactgctaaagctggccaaggtggcatgagaaatttaagcttttctgaagtatcaagaaacggcggtatttcaaaacctgctgaatttggcgtcaacggtattcgtgttaattatatctgtgaatccgcttcacctccggatataatggtacttcctacgcaagcatcgtctaaaactggtaaagtgtttgggcaagaatttagagaagtataaattgagggagccttcgggttccctttttctttataaatactattaaaataaaggggcatataatggctgatttaaaagtaggttcaacaactggaggctctgtcatttggcatcaaggaaattttccattgaatccagccggtgacgatgtactctataaatcatttaaaatatattcagaatataataaaccacaagctgctgataacgatttcgtttctaaagctaacggtggtacttacgccgcgactgttcgatttaatggaggcgtacatgttcctactataggtagtagtcaacagtgcggtgtttatccaggtaacggtgatgcagctacttttgctatggcaaatattgacatcgtttcgtggaatggtattggttttaaatcatcacaaggttcagcagaccgaactgttgtaattaatgcacgtaatggtgatattagtacaaaaggcgttgtgacagcagtaggtcaaataagaagtaatgcagtttctcctgtatcagcaaatgaccttactagaaaggactatgttgatggagcaataaatactgttacagcaaatgcgaactctagggtgctacgatctggtgacaccatgataggtaatttaacagcgccaaactttttctcgcagaatcctgcatctcaaccttcacatgttccacgatttgaccaaatcgtaattaaggattctgttcaagatttcggctattattaagaggacttatggctactttaaaacaaatacaatttaaaagaagcaaaaccgcaggtgcacgtcctgctgcttcagtattagccgaaggtgaattggctataaacttaaaagatagaacaatttttactaaagatgatacaggaaatatcattgatctaggtattgctaaaggcggtcaaattgatggaaatgtaactattgatggaactttacgcgtcaatggaccaataaacaactttggaaatttttctacaagtggtactattacggcaagtaatattgtttctgctacagtattcagatcaacatccggttcattttatacaagagcaataaatgatactgcaaatgcccatctttggtttgaaaatacgaatggatcggagagaggggttttatattcaaaaccacagtctgaaaatgaaggcgtaattacaatgcgcgttcgccaaggaaccgcagcaggggctcaaaattcagaatttcatttcatttctactgatggcggtatcttccaggcacgcaaattaactgctttaacttctattagtacaccaactattagtgttaatttaattaatcatgattctaaagcctttggacaatacgattcacaatcattagttcagtatgtttatcctggaaccggtgaaacaaatggtgtaaactatcttcgtaaagttcgagctaaatcaggtggcactatgtggcatgaaatctgtacagctcagacaggacaagctgatgaaatgtcatggtggactggtaatactcctcagtctaaacaatacggtattcgtaatgacggacgaatggctggacgtaatagccttgcattaggtacattcactacaaatttcccgtctagtgattatggcaacgtcggtgtaatgggcgataaatatcttgttctcggtgacactgtaactggcttgtcatacaaaaaaactggtgtatttgatctagttggcggtggatattctgttgcttctattactcctgacagtttccgtagtactcgtaaaggtatatttggtcgttccgaggaccaaggcaccacatggattatgcctggcactaatgccgctttcttgtctgttcaaacacaagctgataataacaatgctggagacggccagacgcatattgggtacaatgctggcggtaaaatgagtcattatttccgcggtaaaggcaaaactaatattaatactcaggaaggtgtagacgttaacccgggtatattgaagttaaccaccggcggtgaaagtattagctttaatgccgcaactggaagtattaattctacattagcttttcgtcttaataaaggcataattattgatggacctgataatcagggattccagtttaacgccccgacggctgcagatggtactagaagtatatactggaacagtggtactcgcgcaggtcaaaacaaaagccctgttacagttaaagtgtggggtaattcatttaacgcatcgggcgatcgtgctcgtgaaacggtttttgaagtagctgatgggcaaggtttccatttttattctcaacgtgtagctcctgcgcctggttctaccgtcggacctattcaatttcgagttaatggtggtttattaacttctggtggtattacatcatctggttctattgttactgaatcaagtttagttgccaataatggcatgtcagtaaatggtcaggctaaatttggcggaacagcaaacgcactgagaatttggaacgctgaatacggtgttattttccgtcgttctgaaagtaacttttacattattccaaccaatcaaaatgaaggcgaaagcggagacattcatagctctttgagacctgtaagaataggattaaacgatggcatggttgggttaggaagagattcttttatagtagatcaaaataatgctttaactacgataaacagtaactctcgcattaatgccaactttagaatgcaattagggcagtcgacatatattgatgcagaatgcactgatgccgttagacctgcaggggctggttcatttgcctcgcaaaataatgaaaacgtccgtgctccgttctatatgaatattaatcgcacagatacaagtacttacgttccaattgttaaacagagatacgtacaaaataatagttgctattctattggtactttaattaatggcggtaattttagagttcattatcatgaaggtggtgatggcggttctactggcgcgattataaaggatttaggttgggaatttaataaaaacggtgatttttactctcctggtaaattaggtgctggaaatattcgtatcggaacagacggtaatattacaggtggttctggtaattttgctaacttgaataccacattaaaccgtaaggtcaattccggatttgtaacatacggtgcaactgctggatggtataaattcgctacagtaacgatgccacaatctacttctactgtttcatttactataactggtggtaaaggatttaataccggactgtttacacaatgtgctataacagaaattgttcttcgtactggtaatgaccgcccagcaggtttaaacgccgtgatgtataccagaacagctgcaggtcttactgatattgctgtagttaatacctcaggaaatacatatgatatctatgttgaatctggtacttatgccaatcaattagcttatacatggcatacagttgataatgctacagtagaagttatcggcgcttttggtcctactcaagacccggtagattctttgccggctgattatgttaaaggccaagtagctaacatgcttaacaacctggtagacacaggtaaagtaaaacgttatgtagcagaatctgaaattgctattaataaccaaacgggtcttcgtattacgagtaattctgatagatcaggttctaattccgttttatttcgaaatgacggtggaagcttctatattttactgactgacaaaaactcttcagacggcgataataaagcaactgaaggcgattggaatggaaaacgaccgttttcaatcgatatgactgctggtactgttcgtcttggcgaaaatacttcttttgataaagatattactattaatggaaacattaattcacgagttaaagctgccggacaatggagtgttagcttttctgctatttcagatgtgactcgcgacaattctgcattcttagcgaatacgggtggcatttccaagacaagtcaagcttattacccgctattttctggatacagttttttaactgacgcgggttatcgacaatcgtttgaatttggatggttaggtgtttctggtacttggcgccaaggcattattcgcatgcgtggtgacaacgcatcggggcaacaggctcgttggacttttgatatggacggaacattttatgctcctatactatcatgcggatctgcgagagcattcggtgtcaatacatcaaatggtctcggtggaaacagtataacatttggtgatagcgatactggtattaagcaaaatggcgatggattattagacatatatgcgaacagcgtacaagtgttccgtttccaaaacggtgatttgtactcatacaaaaatataaatgctccaaacgtttatattcgttctgatattcgtttaaaatccaacttcaaacctatcgaaaatgcacttgataaagttgaaaaactcaacggtgtcatttacgataaagctgaatacatcggtggagaggcaattgaaactgaagcgggtattgtggctcaaacgttacaagacgttttaccagaagctgtccgtgaaacagaagacagtaagggtaataaaatactcactgtttcttctcaagcccagattgctcttctagttgaagctgtgaaaacactttcttctcgtgtaaaagaacttgaatctaaacttatgtaaaggagggcttcggccctctaaggatttttaatggcaattgtaggtgttcctggctggattggtgaatctgccgtgaatgaaactggacaacgctggatggacgctgcgatgaaagctgttcgtgtttcagttcccggttggatgagttcaatggctgggcaatctaaagaagtatattatagcgttggtgctagcaattcttacaataaagacacactaataaattggataaaagcccaaggcagtactcctgttgttattactattacaggaaatattgtttctcaatctactggtgttccatgcttagattttcctagctcattaactaatgcatatgttaccttaaatattaatagtggggttcatgtattaggtcggggaggaaatggcggaagtaactctgctggcggagcaggaggaactgcaataaataacggaattggaactcgtttaagaataaacaataatggtattattggtggcggcggaggtggcggcgctggtgctagataccatcctttccctcaaatggatatgatatttggtggcggcggaggtcgtccatttggcgcagctggcgcagcaggaggtggcgcagcggcagcatccgctggtacaatttctgctcctggtaaaggtactgtttctggggttcactatggaggaaatggtggagatttgggagctgctggcaaatcttcatatattaaaggtggtactggaggaactgttcactcgggtggtgctgcgggtaaagctgttactggtaatgctccaacttggactaaagttggcacaatatatggttcaagagtataatttttgaataaatatccttaaaaggagggtctatggcagcacctagaatatcattttcgccctctgatattctatttggtgttctagatcgcttgttcaaagataacgctaccgggaaggttcttgcctcccgagtagctgtcgtaattcttttatttatgatggcgattgtttggtataggggagatagtttctttgagtactataagcaatcaaagtatgaaacatacagtgaaattattgaaaaggaaagaaatgcacgctttgaatctgtcgccctggaacaactccagatagttcatatatcatctgaggcagactttagtgcggtgtattctttccgccctaaaaatttaaactattttgttgatattatagcatatgaaggaagattaccttcaacaataactgaaaaatcacttggaggatatcctgttgataaaactatggatgaatatacagttcatttaaatggacgtcattattattccgattcaaaatttgcttttttaccaactaaaaagcctactcccgaaataaactacatgtacagttgtccatattttaatttggataatatctatgctggaacaataacaatgtactggtatagaaatgatcatataagtaatgaccgccttgaatcaatatgtgctcaggcggccagaatattaggaagggctaaataattatttgttcgtatacatctctagatatcgatatacaccctcaaaaccctcgttgaattcgtcgatgagggttttcttatcttcttgagttaattcagaaacaattttacggaatgaattctgatttaattttctaccttcatgcgttactccaatctcattcagaaatgcaataaaattagcacgattttcaacaatatcttctctggaaaatttaatcaaaatagacgcaacagtaataatttcacgaactgtatcaatgtttttattcattaactataccactcaattagttgactttgctataatatcatcagacgcttgatttgtaaactggtctgtggtattttcttcaaaaattttttctacgaattccttgaacgactcgcgttcctgagctacattatgctcgattaccttttcaagattatgactcattcgaaataatcttcaatttcataatcatggacataaatcattatagtttttaatacatcatcaatactttttcctggagctggaattacgtaaaaatatcctgcttttgagaggtctttataagttccaatcaagaaatcattattctcaagatgtagttcttcaactaattcattaacaattgaatggtataggtttggtagaaacttatatagcttttctagaatatcaattttgattgtgtattgaaccacagattgagaatcaataatcatagaccttccccttatgtttctgtttgcgattagattctttaaacgctttcttcttatccttatgaacagaagctttattaaaattatgttttgcgactaaattgttcatagtgctgaattacctctctcaaacatttgcatgtgaatgaaaactttttagctacaccacattcaaatatgtgttctcttaaatcacatgtatcagtatatcccatctcaacaataaaatgccttattagatttttatctttatcattgagagaattaaaataatcagattttgaattaatttccctggccaaattgaatcaccttcagttgacgttttaattcttttatcatctcttcgttcatcgcaatataaagatcgcgtaaagcaggttttagcattccatttactggagaactaaatggacacacataatcttttcctacaagctttttggtgaattccatatcacagaatttaaatcccggctcattggtataaattccccaattagttgacatcattttattagcgtattccagtgcctggatttgattcataattccatcaatttgaaactttttaatattcattagtaaaggtcctcagagtaaagttctttttcactaccaccgcgttcaatacgcacctgcccagcataagttgcaataatcattgcttcttcacgtgtccaataattactatattggtcaataaacccttggtcatcatcacaaacttgttgagtaactaactgtggtttaactatatctaaaacttctgccatgtccttagaataatgacgagcgcctggaataataagagttcgtccatcttttaatttaaaacggttggctgcgcagacaattcgtcgttgatacttttgattttcatcccaatatgcagtctgccaacagatttcaggaacttctttcagaatatcttcttctgtgcatttataaccatgcgctttaaatttttgaacaagactctccggagtctcacgagataaaggaacattcagcatttttaaacgattgataaatgggttcatttaaaccatcctttaatacgctgccacaaagttttctgctgagttttgttaacaccaattgagcgaataactggttgagattcctggaattctttataatcagcaaggtaaatttcgtaagctgcatccgtaaatgaacttatcgctgccataaaattattgcgaatacctattggagcatctttactgtcacgaataatcatgtatttaccagtcttaatctttacaatagttccaagataagctccatggtaccaaatgtcccacccctcttgagtgggttctgcacaacgacgaagttcattgataatttctaacttgttcattatttattcctcacagttcagatgctacagtgattactgcttcaatgttttctgccgagcgtttaatgtcaagatacacattaccgtttttagcgattttacaagacattccgatatcagtaaatttctgaatatgatgttccatcattttgtatccaaaaattcgcatatttccattattgttaatttcaaaattgcgaattccgtgggtgcgtttttctaaaatagcgagatagttactgcgataagtttcaacctttttaagaacaaatccattttcatctaaaagttttaacataaagtctttatcttcttccatatcagaagtaatctcgcgagctttacgagttgctcgttttttcagcagttcaggagcgttttcctgtgcatataaagttgctgcgtttgaaataatatcttgcgcttcgcctgtgatgattaatccatcacctgatttctctaccaggccttttttaatcaataccccaatattactattaactactgcgttacctaaatctggatgcacctcacgaacttctgcggctgtaatgaaatctttcttagcaatagtaattaaaatcgcagcagttttttcattcagaacatcgttagaagctttgatgatgtaagttactttagacattttctaatctccgtaattctgtatcagtagttgatagttgtatagtaccacagtatgctttggttgtaaaccgttttgtgaaaaatttttgaaataaaaaagggagagccgaggctctccctaaaattactgcatgactgtgataactgtcatgataacacgttgaatgccgaacgcaagaagacctcctgctacggctggaacaacacctaaacccgccagtaaaatgctaccggatactaatgcagcgcttgtaatacctataaatggactcatttgatttcctctaaatctttagtgtattcggtaactacatcagtagttttccaatattcgttttcttctttcttagctttagcttcttcagcaagtttctttgcttcgtcggaagtcatatgaaaaatattcattccgactagtttatcaacataagaagaatacatctcaattttagaaagttcttcggtcagttctttacgagttttaccctgcacaacgatttcacctgaaattactttcttaataaaatgtgccttggcaaaggctaaacgaaatgctgattcagtttctttgattttgttatcaattcgtttttggacataagttttacgaacttcaacaaagtctttaattaaatcaactacgttatcgtaaacttgcagctttcctttctcattaataaccgtaatattctgagaacgacgctcaatcaacccgaagtctttcatgatttttgcatggcgttcttcttcgttatcgctcaaagagtattctttgcggaatttaattttaaagccaaaaccatgctcaccacaagcatcatcccatgtaatgaagcctttatcttcaagcgggtctaagattttactcacgtaagtttcacgatcatacttatacggaatctcagtgatattcatttgagttcgtgaagtaaacttgtacgttccacgaatttcatattgaccgtcaatttcaacgacttcaccacgaaattctgggaattctaccttcggtttagttactttctttccttgaagagcttgtaatacagctttcttgacagaagaaacgctatgaggaagaatgtaagttgcataaccagttgcaataccggaaacaccattaagaagaacggtaggaataataggcaaatagaaagcaggcggaatgtgttctttatcttgatgtaccggagcatattcaatatctttatatacactatagaaatttttacttacacgagcaaaaatataacgacttgctgctgctttttgaacggtacgagaaccaaagtttccttgaccatctaacaaaggaaagttattattccaagtattagccatcaaagcccccgcgtcttgcgcagagttttcgccatgatgatatccaaggtccgctacaccgcctgcaatagaagcgagtttgtgaaacttatctttatttcctcgtgccaaatcaagagctcgagcgataacaaatcgttgaactggcttaaatccatcaatcatatttgggatagcacgattttcaaccgtgtacatagcataagccaatgcttcattatcaatgatactttttaaatcgcgattattcagttgcataaatttaccatactagtgaatgtagtgccataataacatcagaaatgaaaagcacgacttgaattaatccgaacattactccataatatagtgctaccaataaagtagcaagggctactgagtagcccaagattttcttaatcattagtagataacaacacaaatgttaaatatgcacacataccctgagctaaagcttgtgaaaacacgctgctggcatcaatacagatagttaaaacacatgctactatccaacaaataaatgaaataactcctaataattttgcaatattcatattttcctcactggcgtccgaagacgcctttagttttaagattgttacgatagaactgcatcacgtgttcgttatggaaattactcattaatacgcctgcaaaacaaatttaaagttatcagccaacatacgattcatttcttcaagtgtttgatactcagaatgatgattacgggtaaacgccaaagctaactgaccttttccaaaccccgtcgtcagaggtttcatcttagaagcaggtagataaaataccgtgtatggaacattgttatttgcaatagtacgtgcaagctgagaccgacgctgacgaatatgacttagaactgcactgaatccttgcttagaacgttgattacctacataaaatcgtgcagacacacatggattactaaatagacgaccatctaatttacttactaaaaagtaaaatccaggtttagataaaatatctttatgtggaactcccaaaaaccattcaccgttcttgattgtaccaataacggtagcgcctgcattgttcagatcagtaacagtcatatatttcatattaatttcctctaaattattttctactccaaggccgcatgaatacacacggccattaaattaatcatcgcagtcgacgcttaattcccagaactcttctacagtataagtttcagtatcattttcaatacagaaacgttcattgctgttatttgctaaagtagcgttaactgtcattttctcgctagtgcttttaagaggcgaaatacgaattaactgatcaccattatctaagcaaaaaatttcaccaacttttacatctttaaagattttcataattcacctcaaggagtataaaatccaaatgcagttgttgaccatcccatccaatatgggaaatttgcaccaatgtaaaacataagaatataaaaccaaatgcttagtaaattcattattttacaccattccaaattgtttcaaccacagattttaagccattttggtgaatatccattccgacaactgccatcaaatagattccaaatacaactgaacctaaggcaaaaatcagcatgaaaatgaataaagctggaaaaatattatcgaaaaaccattcaataaatgtaaaagcactgcgtttacgcttcatattttcctcacataaatccaaagtaagcgtttaatacatcaatcattaaaacgattgggaatatactcaaaactactagtattataactacattccatatagctttaataatctttttcattttctgttcctccgtagttgatagggtaatagtaccacggaagaacagtcttgtaaacaactttttaaaaatattcgtaataaatgtgaataccaactactaccgctgaaacctgtgcaacccaccacgcacaagcaataagtacagaattcaaaattttcataataacctcatcacaaaagtaaatgttaaacaaattaatggaatactaattaaccaaacgaaacaccaccatagtgaactcataactcaatctcagcgattttcattttactcaataatccgctaaaagatcgacgattgcatcacgaagacacttattcgcaatacgtttaagagcaatttcagtttctggagcattttgaataatcattgaattcaattcagcctcagcaaactgaagttctttaactaattcagctttatattttccttgccctttcttagcttttgctcgttttagttcagctgtagtaaacattttattctccaaatccgtatcagttgatagttgtatattaccacagtccttgtggtatgtaaaccgctttgtgaaaatttttaaatggaaagataccatccgttgtagttgctttttcttacaaccttacgaaggtcttctctatcaccgatgaatttcggagtgtactggatgacacctggatgaatttctttagtgttgaatataattatacagtcagcgacttgatgatttagaatgggccctagatttattccagaaccatatggatactctccgctgcatccggttgttaccgaaatccaacgtgagtcagtttgatgtgtcttaacttctacacgaagcccacagtattttggatgcgccaatacatcccatgcgtatgtatacgggtcattaacatcctcttggcctttgttaacatacccgcttagccaatctgctacaaaaaattctgcgtacacagcgatacgacatctttcaataacttctgctttatcctggttcgggttttgttttaaagagtatcttgctgtatcagcaattttgaccttcatttcactagtcaagtcactgttcgatagggtaaatgtcggaatctgaaatagtctctgtaaacccggattcgttttctgcatttaaactttcctttatgtcggaatcataatttctcttaaaacaaaagggccgaagcccttattttatttgaattgtgcgattcttttctctagacactcagcataagatttcattgagatgaactgtgaaagcaacagttcttgctcaactgcactaaccgttagaaactttgtgctttctaaaaatttgctcagtgcattaattttgagcattaattggtcgtattcttcttttactcgtgcttgataacctaacataattttccttagttaagggccgaagcccttatttaaattgttcagtaacgtcttcaactacttcgtattggcaggtacgcattttagcatcgttgtaatcaatcggaattgatactacatcacgtggatgtactttaacttttacaactcggctggttgaactgccaaagtgacgaatataagatttagaacacacatgcagaccacgagaacaagtttgtgtatcatcgtcattcacacgagtacgcggcattttaactactttaccaggactgttatcaaaggtgtttgagtgacagtcaaagtagttgtcacgaactactttccaagcatagaagtaaccatcttctgtaatttcaatatcgtttgctaccaagaaatcaaagagtcgagataccgctttctggcttgggttttccagcagattttccaagaacggaaaataaaattcaaagttttcacctttttccatcgaatcgagaatacgatcaaccaaaccagaccgcaattcgatattttgatagaacaagcttccaccttcaattcgaacatcgccggaaatatatttttcaacagcgcgacgaacattaattttttgtgccgcttcttccaacttatctgctacaagcagattaagaatttcctggaagtttgaatgagtattaggagttgcgttataagttacaccgtcaacagtaattgaaatgaattttttagatgcattccaaataatgtcagatttagcaactggagcaataactgcatcgctattaactttaattgtaatatcaccgctaatagtaactttagagcgtttagcttcttcagcatttttcaaaacacgacgaattgtgtcaaccgatacaccttgccaatcagccaattcctgttgggtgtaattaccacttgaatacaatttaacaatttcagcttgttcgtttttggtcaggcatttaatattgtacataattttccttattaggccgcaagggccttcatagttttagcgatttgggaaacttcatcatcactcaaagagttacgataaccgatgaagtcggaaacaatacggaatttcttggtaaactcagcaaccattttatcactattttttgaagcattacgtgataattcatcaaagagattagttactgtccagatatcatgaccgatggtatcttttccaccattgaaatacacaccgcgtaatgaactaaccatattaccaagtcgtgtatattcttcagaaacttcatctgtactgaagtacttcatcataaaatctagttcaggatacttgataattttatcaatatatcgttgagctgaacttgaataacctacatacttatcataatctacatcatcaaaagcatctacatataaatcacgcaaagcttcaaaaatacattggcactgaccgagttcttttacctttttctgtaaaagcggacgaataacataaaattcattaatgccaataagattagccatacgaatcaaaatattcatagatggatgacaaagtgatgtagtaccatccatagagaaaatatcagaacgatgcatatacgctacataaccagtaatttcatctgcttctgatgtaagtgtaaacagttcctctttttcccagcgcccgtctttaatttcaaacttaaacgcagtagcagctttaggacgaggagctttacttttaactgccttcggaatataacttttaactaaagcttcaatttctgacaaataatgaatgttaacttcatcactttcaaacattgccataatatcaggtagtaaatcaatctgcgattctacttccggattaataaacagaagacgctcattatgatgaatattcaaagtgttattaaattcactatcatctaacgcatgcgctaatccacggacaatattaacacgatttttaatattatcaataacgatattaatttttgttgtattaataccaaacagacgataacttgatgcaacggctgaagtttcatggctttgcttaatgcgtttcagtcgagggtcaagatttacttcatacacaactcctgcattacataacttactgtcaggttcaaacatgctctgcattttcttatatgacagatttttagtcgtgaatttgactgaattactaatcatataatctcgagcagaataccccatcttcatcaattcacgatatgtgtgacgaggagatgtagattctttaaatcgttttacatcttcattaaatgctttctcactaagctctttaactcgttcaataatatttttacgagtgcgatcatccaatgaaagagcttcacgtgatggagcaatatcaagtgaacccattggaaacttaatgtaattcacttcattacgaatgcttagccagttacggtctttaataacaccatcgataggataaacaataccgccgtagatagcatataatccaccacgatcaggccagtatctttctggatttacaccgtaataatcatcaaaatccggaaaataatcaatttcgcggtcaagaccattaatgatagccaaatctttgaacggtcgcatgatataagaaacttcataagcaaagtttctaaagtctttttcttcaactggaactacgatttcaataccagttttatcatctggacccatttcttttacgaatgtaggtttaatttgtggaccatcgccatccatgtaagctacataaccacgaatttcacctttatgatacgaagtaatactaaacgtatcagtataactaaacggagatttagaacctaaaccaaatccgccaatgaaatcattagattcagccttagatgaactgaagtatgaattatacagaccaggagaattatcatcaccctgaatatcaaaatcactcatacccggaccaaaatctcgacaaacaaatcgtggatctaaacgtccaggaacttgaatgataaatttttcaggatttccattgagagcatgggcatcaatcatgttagtaatcaattcacggactactgcgcgaatcttgtttgtatacaaatcagatgacagaattttaaatactttaggagatgctgtgatgctaaatgcttttgatttagaaccattaccaagaattgtttctttttcagtggtgataatcataatttcctcattaattcatattacgcttaataacttcggcaacttctagtagttcatctttagttgcggtgtcggattgaattttatctctaatatccttaaagcggtttttaaattcttcggcttctcccatatcgaaaaagcgttgaatgattctatattctcgatgaactgctttatcaaaaagttctaaatttactttatatgatttcatttcaatatcctcatttgcccaattaattataccacatccttgtggtaaagtaaactactggctcatccattctttacgaaggtcagcattatctcccatgagcatttcaaaaagctctttccagttctcaggaagtttaacaacatcatatactggattttgaatcatctcacgatattcagatttttccaaagagccaagtcccttaatataacggatgctatgtttaggtagagcatctttggcactctcatattcagcgactgtataaaaccattcttgttttttaccgacctgagcgatgattacaggagttttgacaaagcgaattcgtccttgctcaaacagttctggccaattactaaaaaatccgagcagagaaggataaatgcttcctagaccatcatggtcagcatcagtcataatagcgatattatgataattcaagttttcagctttttcaccgagaactaatccagtgattgcgcaaatatcaaatagttctttgtttttaagcatatctgcataagacataccccaactgttgagaactttaccacgtaatggataaccaccatgaagttctttatcacgaacatcaataagatatccgatagcagaatcaccctcagtcaagaaaagagtagtatcagcatctttaccacaaagattcgctttgatatgtttatgaaccttagctttagatgcctttttagctgctttagtttctgctgctttttctgccgccaatttacgagctagtgcagcttcaataattggcatcaaaatcgcttcattattcaaaatagcacgtgaaatctttttagcatcaagttgaatatgactacggatttcaccaaatggagaagtcaaacgctctttagtttgagaatcaaatcgcatgtttttcatatcacgaacaaacataacgatagtcaaacattctttaacacgcgctttagttacatcaattttgaacttacgtttgatttgtggaataaggtcttcacaaatatcatccataacacagtcaatatgatggccaccattcttagtgtgaatgttattcacataagttaattggcgaaatccatccggtgaacgaccaacggcaatagaacaattttcttgttcttgaacaatagcatgttcatcatactgtcgtgcatatttcttaaaattgccctgaacctttttaccattaaaggtaaattgaatatcaggataaacaacagcaagtgtctggagacgatctagtgtaatgtcaagataaacttgggacagctcattagtttcaaatgacataaaatcaggaatgaaagtaacacgagttcctttccattttccaggaatagtttcccaggatttattttccatgccatttgaacaacgaactacaatattattttgaccatcaccagtttcaccgacaaacatcacagaaaaaatgttagttaaactagaaccaacaccattcataccaccggtgacacgttctttatcatcaccaaagttaccacccgcttttggaatagtccaagcagcaactggaccaggaatttcttcaccggtaggtgttttaaccatcgcctgtggaataccacgaccgttatcttcaactgttacttgattgtttttaatagtaacattaattttatttgcgaatttaaacttagtacgaataccttcatcgactgagttatcgataatttcatcaataagcttaacaagaccaggtacatactgaacactttcccatttaccaaacagaaagcgctcatgcatttcattagcagaagagccaatgtacatgccactacgctttttgatatgttcaatatcgctcagaattttaatttcattcttaatcatcacttatcctcgtttggtttcgggaatattatactccggtaatcataaagctaaaggcccgaaggcct

SEQ ID NO: 13 - DNA, 44887 bp, bacteriophage
attggagaatactacaatggcaaaagcaccactcttcacacttgaccctaagccgacctttaagctgcagattgagatcccgcgccccggtgaaaacgaaccgggaaaaatgacgtttaccgtgcgccaccgcccgatcgacgaattttcgcagaccatgcaggatactgagcgcaagttgtcggagtatgacgacaatgaccctgacggctttaacgttatggtcgaggccataatgcacgtcgctgaaggctggaatctgccagatgaatttaacgcggagaacgtccgccgcctggtggttaactaccctcgagcgttcggtgtgttccacacgtcgtactatctcgaactgatgggattgcgtgaaaaaaactaattgaggcggcgcgacgcttttatggcccgccgccaccctccgaagatttagccgcgagtttatggggggcggcccctgaagacgtttgccccccggttgcactatggcccgacaacgcgaaggtagtcgcagtcttcacagattgcgccacgcaatggcgcaccggattcggtggcgcatacggcatcgactacggcgtactggaatggctatttaagatgcacggcatcgaaaacgcgcaacgcgcgtttaaagatatcaagctaatggaacgcgttgcgctggatgaaatggcgcggcagaaccccgcataacggagcgggacaggcgggacgtcccgttttgtcccgcacctctaaaactgcatatttactcaccacaattgcataaattaaaagcgggacaggggtgctgtcccgatctgtcccacccccaaaatgtgaatgtctattcagttttattgcataaagtaagcgggacaaaaagcgggacagaatgaggcgggacaaagcgggacagcaccctgtccccgccagtgctgccgcgggttttagccgatcgggacaggcgggacaaagcccagtctttcagactagacgggggtcaatggcccccctcgtctgagactgaataaggtttgttttaaattcgctgatacaatgaccgacggcaactgcataaaaagggggactgcataatggcagatcaggcagcgggcatcacgctcaaggcggacgtcgcgcaaattaaaacggcgaatactgtgctggacacatttgcgcagaaatccgagaacacagaacagaaagtcaaaaaattaaacgacaccctcggcaagtcgaaaaaggtcacgggtgacgccgctggcggaatggaaaagttagcgactgaatctcagcgtgccgccgacggcatgacgaaacaggagcgactcgccagccgattaggcatgtcgaccaaaaacctgggattcgcatcgcggaacgccgcattccagttacaggatatcgcggttacgcttgagatgggtatgccggtgcaccgcgtcatgcttcagcagctaccacagctaaccggcgcatttggcggactaggtaacacgctgcgttatgttgcaggcttcctcggccccgtagggatcggccttgccgccgtaacggcgacgttaggcgtgggtgttgcaattacgtcccgagcagagaaccaggtagcggcgcttaataagacgctggcactttccggtaacatttccggcctgacggcaaaccagatcctggtgctgtccgagaacgccgagcgcatgggcgggtcatttcgcaagacgcgtgacacaatccaggcgctggcggcggcgggtgtgaaagcaggtggtgacttcggcgcattggctaaggtagttaatgactttgcgaaggtgtccagccagccgatcgaggatgtggtagcggcggtggcgaagctgtcaaccgaccccgttggcggactgcgtgcgctggcggataagtatcacgtcgtaaacgaagcgcagatccagcaggtacagtcgctcgttgatgcgggtcgtgagacagacgcagttgcgttggctaacaaaacagccgctgcgtcgttcaccagcatgaccaatgagatcaaggcgaacatgggtacgcttgagcgatctatgaacgtcgtcacatcggcagccaaatcaatgtgggatgccatcctggatgtgggccgcgcgcagtcctccaatgaatccgagatgaaagcgcgcgaatcactgcagcggctgaccacggcttactatgccgagatgaaagcggtaaacgctgccggtggggtaatgcctgaagcgcagaaagcacgtattaacatgctttacagcgaactggtcgcccaggaaaaagtggtggcgtcgctcaccctgcgtaaccgtgctgagcgagacaacgcccgcgccgcagacgaatccgcaaaggcgaacgaggaggccaaccgcactgcccgtgaccgcgccgcgttcgagaaggaatacgccaccaacgctaagaagcgcgccgacgagatcgcccgcctcaatttgctgaataagcgcggcgttattgatgagaaagaactagccgaggcggtgaagcaggtaaacgagcggtacaaagacccagccccgaaaaaggccgcggctgttcgcgtggatgccggtatgaaaatgctggaagtcgcacggagcgaactggcccagcttcgagaatccggcaagcagatcgaagccaacgcgtctacgcagacccgcacgcaacgcgctcaagcggccttaaacaagctgatcgccgacaatgagcagttaatcgctgcgagcaaagaaagagcgctaacggcagcagaaaagcagcaattagtcgagttcgggcgcgtgaaggaagtccgcgagcagatcgtcgaagaagccaaattgctggatgcgaaagagcagcaggttaaggcgcacgcgcagatcgatgccttcgttaagaaccagaacgccgaactaaaagccaccgccgcggggtatgcgctttccactcgcgaagcggcaaacctgcgcgaagaattgcagctaattgaccgcctgaagcgggtgggcgctaacgataccgatattgatctggcggtgtctaagctgcgcgaagtgcaggaagcacagaccggtgctaacgcctcgctatgggatggcttcagccgagggcttaaggatagcgtggatgatatgggtaacggctatacgcagatggcgtcactcacaaaattcacgttcggcgctatgcaggacacgatgaacgagtttttcgagactggcaagctgaacgcaaaggatatggttaagtccattctgagcgaattaatcaagctggctacatcgcaggcgttcaagtccatcgttagcgctttcggtggcgacggcggcaaaaacggattgttcggcgctatcttctccggcctcactaagaatgcggacggcggagcgtacgcagggggcaatctcgcggcctattcggggcaggtggtaagccagccaacctttttcagttatggcgtccaggcgttcgctaagggcgcaggattgatgggcgaggctggtccagaggccatcatgccgctgaagcgcgggccggacgggaaactgggcgttgccgcgtctggcgcaggcggtggtatggtcgtgacgactaacgtttacacggggaccggtaaaacggataccagtgtcagcgggccggatccccgtaccgcgcaggcgttcggcaagcaaatcaccgaggcggtgaaggccgagatcgtgaaggcgacgaaaccgggtggtgtactttacaaacgatgataaaatggccctcactacaacgtgggggctttttatgtcacaaggtacaatcacactaacgaaaggaagtaagaccgtcacgggcgcgggaacggcgttccttagcgagatcgggaaggtactcgtattcgcccgcatcgacggcaacgactacaccggcaaaattgcggcattcaactcgaacacggtcattactctgaaagataactgggctgggccaacgaaatccggtgcgacatatgagctaatcgaagcacacgacccgcgatcaaacgaatggccctattactggcacatgcaattgcagggcggtggcgacgtgcagttagctttccggtcggaggaattgcaattcggtaatggctacggacagaacatcgcggacggcccgaacgccgaaacgaaacagttccccgtgcaattcgtcgggctgactacggacaagtggtgcaaccctaaactggtttacaacttccttcgcgggcacttcgtcaagccgtttgtcgtcaccgcgccggatggcgaaacaggtttattcgtggtcgagcgttcgagcttgtcgtacacggacaacggacacctcacggcaaccgtatctgccacccttaagactgctattggattcgtaagatgaataaactttatcgcgaggctacgcgctttgacccatcgggtcgcgttcgcctgattcacattgacgcgcaggacgtggaaccaggcgacggtgcgatcggcgcgggccatcactatttccactactgctttattccgcacactgccgaggatattgctgccgccggtggtgacgaggataagctaaaacctaaatcaatcttcttcggcgggcaggagttcgaattttggcccttcgatttgtccggccttaacttctccacatcgacggcggcagaaccgcaactaacaatcgtcgatattggcggcataataacccggctgtcgctgaaccacgaccagctacttggcgcgaaggttgagatcattgatacgttcgcgaagttcctggataacgggacagatccagacccgacgcagaaacgaattcaggagtattacatcgactcccaggtgggccgaaatccgggcaagcaaattaccttcgcactatcctcgcctgcggatatggaagggcaggtcgttccccgtcgccaaatcatgaatatgtgcgagtgggcgctcaacgggaagtacgccagcggggacgggtgcacctggaaccttgcgaagcctggtataaagtattatgacgagcgaggtaatgaagtcatcgcgatgaacatggaccgatgcggcggctgtttgtcagactgttatcttcgatttgggcaagggcttgcggaccctaaagcggcggtgctggacttcggcggctttccggggtccagattaattaaggggtagttatgttaacgaaaaaggttaaaagcgatatcgccgcacacgtcgcggcgtgtctgccggaagaagcctgtggcctggttgtcatggtgggtcgtaagcaagtgttcgtcccatgtctgaacgtattcgaagacccgaccggcgtgcgctcccgcaaagacgcttttacgattagtgatatggcctggatggatgccgaggatatgggcgacgtcgtgcgcgtagtccactcacacccgggtcagcgcgagttaaccccctcactgggcgacgttaacggatgcaacggcagcggcgtagtgtggaccatcactaacgaatatggcgactttattgagattgacccggaagacccgccgctggtaggccgccgatttgttctcggaattacggattgttacggcctcgtcatggactggcacaaaaagcagggagtaaatttgccagacttccgcgtgccgtacaactggtgggagaccggggagaacctgtacatggataactggtacggtgcaggcttcagggaatgcgaggagaatacgcctggggcgatggtcatcatgcagattagcgcgccagtgcctaaccacgccgggatattccttccgggcaaccaactcctacaccatatctacggcagtctgtcgagcgtgatacccttccggtcaggatttttccgggacaatgtggttaaatgggtacgtcataaagacctaccggggaatataacagaatggcaatgaccacatttaaattatacggcgttttaggacgtcgattcggtaaagtgcataagctggactgcttcactccgggcgagggtatcaccggcctgtgcgtgaagttacccggcttacaggactttctaatgtcggcccacctggacaatatgatgttcaaggtgcgcaaaggcgaccacacgatgaccggctatgatgagctgggcgagttccacggcaaccgcgtcgttaccatcgctccggttatgacgggcgcaaaaagagggttgggacaattgctggcgggtgtcgcgatcgtagtggcgtcgttctatacgggcggacttgctactgccgctttcggggcttcggctgcaaccgctgccgctatcgggacggcgacgttttcgttcgggatgtcgatggcgctgggtggcgttatgcaattgctgtcgccacaaccgaaaggattgcagacaaggcaggacgtggataacaaagcgtcgtacgcgttcggcgggccagtgaatacaacagcgcaaggcacggcgcttggtgtattatggggcgagcgtgagatcggcggcgctattatttcagccggaatagtaaccgaggacttgaacgaatgacgattatctacgacgtcacagggcataaaggcggcggcggcaaacagcacaccccacaggagacgccagacagcctgcattcgctggctaaaatccgcatcttgcttgcgctgggggaaggggaattcgaaagtattaccagcgccagcgaattgcggcagcgtgtttacttggatggaacgccgatccagaacgctgacctgtccgaaaacttccctggcgcgcgtgtggagttccgccctggcacacagcaccaggatgtgatccacggattttcagcggtggaaagtgagcaatctgtcggcgtaaaactggaaaacggcacgccgtgggtgcgccagattaacgataccagtctggacgctgttcgcattcgcatcggcattccagccctgtacactaacgaagataatggcgacctggtgggcgggcgcatcgactataagatagttgtgtatacggataacgccgacccgcgtgagttcagattcgccgccgttggtaaaacaatgtcgctatatgagcgcgaccaccgcatcgaattacctccgaacgttaacaccggctggcgcgtggaggtgcaccgcataacggcagactccacatcggcgaaagtggttaatgatatccgggtgcagtccatcactgagattattgacgcccgcctgcgttacccgctaaccgcgctgttgtttgtggagttcgacgccaaagcgttccagaacatcccgcgcgtgtccatcaagtgcaaaggccgcaaagttctaataccgaacaactacgacccgattaaccatacctattccggggactgggacggcacgtttaaacgcgcatggacggataaccctgcgtggcactggtacgatatttgtattactgagcgcttcggcctcggtcggcgtatcaaaccgcaaatgttaaaccggtacgcgctctaccagatttcgcagcgctgcgatcagttggtcagcgacggcaacggtggtcgagaaatccgctttaagaatgatatgtacatccagtcgcagacagacgcctggaccgtgcttaaggatttggctgccatctttgctgggatgacctggtggggcaaccagatgttgaatatcgtcagtgaccaaccggtcgcagcagtgtcgcacactatcaccaacgcctcggtaattgatgggcgattcgactacgcatctggtagccagaaaacgcgctattccacattcgcggtagcatacggcaatccgaaaaaccactatgaagatgctatcgcaacggggcaacgtgtcgaactggtacgccgccataagattaaccgtcttgatattacggcgatcggctgtacgcgtgaatctgaagcgcaacgccgcgggcactgggcgctaatttccaaccagcttgaccagcaagttagctttaaagttggcatggaagggttattctttattccaggtagcgtagtcgcgatcgcggatacaaacatttctggcggttttgagacgcgcggcggtcggctgttgtcggaccccggaacgcgtaccgtgctgaacacggacagcgaaatcacattccgccctggcgataagttcctggtgcgcaccgatagcggtaatgtggagactcgcgagatcgccagcgtcaacggcaacaaggtaacgctaaaaaccgcactggacgccaaccctattcctgaccagccgttttgcgttgacggggatgatatccagttgcaaaaattccgcatcaccgatctggaatatgacgactctacgagcactttctcggtgcgcgggattgaatataacgatagcaaatatgatgccgttgataatggcgcgcgcctagacccgggcatctttacacaagtgccggacggtgtaatgaaggggccggaatccgtgactataactccgtcgcagatttcatcgcaaggccagctaatcaccaacgtggatattgttttcccgccggtgaaagatgccgtggtgtatgaaatccagtggaggcgtactagcctgcagaatatggaaatccagtggggtaacgactgggtgaatatcccgcgcacggcgtcgaatggggcgcacatccccaacgtgttctccggtaactaccaggcacgcgtccgcgcgatcggtatgggtgaaatctcgtccccgtgggtgtcgtcacccatcacgccgatcgaaggtcgcctcggtgggcttaatgcgccaatcatcaccaacgcgatttcaggtttgcaccagatcctatggaagtggaaccacaacaacgccgcgacggatatctcctacacagagcttgaagtgcgcaagacgggcgaaacggaatggaaattcctgtccaacgtcccataccctggggcagagtatgcgcaaacgtcgctggagttcgggatttaccagcagttgcgcgcccgtgtggtggataaaatcggcaaccggtcggactggtcggccccgtttgaagggcaggtgagtgacaaagttgacgagtacatgaaggggcttgaggacgagttcttgacttccgaggatggtaaacgcttccaggaagcaatcaacacgatcccgcagggtatttacgaggcgatgctcaccgacgcgcagcaattgttcaacgcccgcgccgagtacaaggggatttatgcggaaatctcggtcgcgtataacgtggcggcggacgcccacaaggcggtcgctcaactggagacgttgatcggcacgcgacttgatgacgcggaagctgcgatccacacgttgcagaccgcgcagagcacacaggaacaagcgttcgcccagtatcagcaaactgttgccgctaagttcggggaacaggaagccgccatccagcaggtacaaacggcaaccgcagacgtggcgggagcgctggcggaatataagacccaggtcgcgacacagttcggtcagcagtccgccgctatcgagcagaagatgacgtcctcgtttaaccactctggtggtagcgccacgtatagccttaaggcgggcgtgacgtataacgggacttactatgatgcgggtatgcagctttccgttgtgacgtctggcaacgcggttaaatcgcgtattgcgttcaaggcggaccagttctacatcatgcacccatctaatgggtcgctttcgtccgcgtttattgttgacggtggtcaggtgtacatcgacaccgcccgcatcaagaatgcgtccattaactttgcgcagataacggacacgttgcagtccaacaactacgacggcagtactcgaggatggcgcttaggtaaggatggaacgtttatcaacctggggactggaagcggtggtggtacaaagcagaccaacaccaactacagcgttaaagacgcgaacggtgttttacgcgtgcaaattggcgagcttacgggtcgctggtagtatgggggcttcggccccttttaacgaggttatttatggcattcggtatcgcaacgtgggacgcgcaaggacgcccaaacaactacggcattaaaccggtaagcgtgatcggaaggattcatcttgcggaaggacaaaaatcaggcgcatggtcattccctgtaccggcggggatgaaggtcggatacgtggtcgcactggataaaggcgcggtcgggccaggacgcagaataaccgccagcgggaacactatcactgtttccgcggcaagtgcggtgggtggcggggtttactccgcatctgaatgtgacgttattgtttttgtggagcgagcataatggctaattacggcgcgttgattgacttaccaaacggcaacccgtttatcacgccagaatcgacgccgttttgtctattccgccgtgtggttgttgggtcttcggctaacggcactgcgcagtcggcggctgccgatattaatttgggcggtgactaccctgcaatagcgtttgtgaaaactacgcacaccacccagccgaccgtcgtagggtcttctcgcgttggtaatgtggtgaaggtgagcgccagcaatccattcgggcaaggcttcacgatgacggcttacatctttgccatattcccacagacccttccgcggtggggcttcgctatttgggataagacggggaagctagtgcttactaatgagagtcgcgtactaagcgatttagttaccgtcggatcgccaggcgctaacggggggattaacattgaccagacgctaaatggcagctacgccgtcgctccaggcatattggggtctacgctgatccggttttttgtgcagggccagccgcaagtaatatcggtaacggcgtacacgggggccagatttgatgggtcacgaacgcgtatatcggcagcgtcgtcggggaacgccacgggggatgtggtggggtatactaacaacggcaacgcgattatggcgattaacacggccaattatgattgaagaaagccccgaaaggggcttatttgcaggttgtgcttttgaaatggtctacagacacgtactggaagttgaacgggtacccagcccggagcattttgtgcccgctaacgtctgcaaccccaaacaccgggacggaatactccataccactattcatatatgtcgcgtcgcagattttagacggcatacctgcacaaccagacagaagaaccgcacaaatcataattaaagttttcatgttatcatctcctatatttggttgagtttagtattacaccgctcaaccgggattgcaaccaatttatgaggattcagctatggcagcgggtacactatccgtaacgaataacagcaaggcggttgtcggggtaggcacgacgtttaccgcgtttaaagctggcgacttcttaacgctggtggtaggacaagtaccctacaccgtagcgattgcgtccattgaaagcaacactgctcttactctggtgctgccgttcgacggcccaacggcgaccggccttgcgtgggacggcgttaagcgcgataccatgtcgctggcaacgatgggcgtaacggtccaggcgcagaaagcattacgcttgatgatcgcagatgaaaacaactggcgtgcaatcttcggcgacgctgaagaaatcacggtaacgctaccgaacgggcaagttatgcagggcatgtcgtggggatatttgtcctccttgctgaaggaagtagaccccgttgagatgcgcaaccttcaacaacaggccgagacggcgaaaaaccaagctgttaccgctaaggggcaggcagaatcggcgcgcgacgcagctaatacggcgaagactggggcggagacggcacgcgaccaggctaacaatgcgaagaccgacgcgcagaccgcaaaaggccaggccgaatccgcgcgcgacgccgctaacactgcgaagaccggggcggagaatgcccgcaaccaggcacaaggctatcgtgacgaggctgaaggctttaaaaaccagattaacccttcgcagtttatgcagaagtcgcaaaacctgaatgacgttgccgataaagcgaaggcccgcactaacctggcgttaaatcgtttcaaccagccgcgcgccgatttaaccgaggtgtactctaacgacgaccgtacggggtacaagctgattgtaaaagataacggcgactggggtgcgatgaaacacgatggtagcgcgaatatggcgctaagcatcggttttggtggtactggcggcaagaccggggctgaagcacgtgcgtcgctgaacgtatttaaacgtgaccgaacatcactaggagagagagatctggatactatcgacggcagcggcgacggtccaggggtgtatttccaggcgtcgtcagccgcggcaacgttagcgcgccactacccggaagcgacagcggggatgctggaggtattccagcacggggcaaatggtgagtcgggggctatccagcgctacacgccgtttacgatcttagctattgcgccggaaggcagccaggaatatgcgcgcgcgggaaaaggcacattctatgtgcggtcgaaaaacggtaacgcccctaaatggtcgccgtggttgccgtttcagactggtctttatggtggcgttgtcagttatccgggtacgcaggagcgctcaagctggacggattatgtcaacgtactcgcacaacaaccaagcagcatggggacgtataacattcgttcagtaggttgggtgaatgccatctcatcccgacaccgtaacggcatcggcgatggccgcaattacggtgttgtttttgaggatgggcaaatggcggctacccactacaaaaacgtaacagtaagaaaacaggtagctggtaactggattaaccccgtcacgttatggcatacaggaaacaccacggttgacagcaacggctttgtgaagcgcgcatccccaatcgtgaaggtgttcgggaccggtgatttcgagactaacgacgaaagcgaaggatgcaaggtcgagaaagtaggcgtaggagagtatctcatcaccggatgtatggcgcttaacgctgatctggcctggggtggcgtgcgtggcggtattgaggtgccgagggatattaacggtcagcctattttgtgggtggattatgaagtcaacgcagacggtagtcttctgcttaagacgttccatcgtgaacatcacgacgcgccggtgttcgcacgtaatacggtgccgggttactcaaacggcgaccctattgatattcctaacgatgtttttgtgtcagtgcgtgtggacatgccagaagattcgatttacaacgtacgggagcgtgagatgcgagcgattgctgaggttgagttagcaacggggggtaaggtgaccgaagagtgaaagaaaggggccgtgcggcccctttttttagtttgagttttcccagtccatttttcgccgcaccagcgggctttcgtaatattccttaccgtccacttccaccaaaggccaatcgttcacgatcacgaatggctccgcaatatcctcgatcacgccgcgcgcgctatgttgccagaacgacacccccaccagaataacaccggcaactcgacgagtgagatactcgcgagcgcaacgcgcctctaccagtccgcgacggatgccgctggtggctttgacctcatatgtccatacggcatcaatcatgtgttctttgtagtcggggccggacttaaccttgcgcttgccgaccatgataatatcgccgcggtcgatagtgttagcgctaaacaggccagtacgcattagcaaaccttgtggaatacagctacgccctcccgcctgcccttcgaggtacatgcctgcaaacatctcgcccagcacaccgacaagacggctttgcttgcacgcgtcagacttgtatcgccactggtcaaactcgatgcttgctatcattgccgccaggtggaattgtttacccgatatttcatattcgccgtacattgtgttgccctcattgatgcgggccgaagcccgcgattagagttatttaagtgcgccagtcaccagtgttttttccatgttacggaagtcttccggcgtcaagaggattttagatccgtcttcgccggtgagtacgaccataggctgtacgtcctgatctgcgatgccaaaattagcggctttaaccgtcttgccctcagatgaagaaggatgccacgtcccagcggaggcgatgggccaaccttttaggctgtcgaattgtgctgccgttgtgtcgatctgaatctcatcatgcacggtcatgtaagactcgcccagcagggcggcatacgctaccaggtcaacgatgttatcttcctggtgcttacggtgctggcgcaccagcttcaggcagatcaggaaggtccaggcttcttgctcggtaagatcgcgcccggtaagcgcgttaaacacggcggctacctgtttagcgctgcgttcttctttcgcgttgtcatagccgttttctttcccgcgctgttccatagtggtggcggcgtttttgcagtattcgtatgctttcatgatgttttcctttttagtgggaggcggtattgcctcccgatgtggttaagatactgcaaccaacctattggttgcgagtgaattttgcaacgtttattgcgtaaattttcgggactaaatcgccgcacgcccgacgaattgccgcgatgttcttcggacagtcttcaatgatgaccagttccgatacgtccgcatagcagaccattttgaacacagcgcacgccttaaactctggcggcggggtgtcgtccagcatgtggcgcatgaacaaccggcctctagggaatacttccaattgctcggctgtggtgccccggcattctcgctgccggttggtcaggtacgcgatctcgaagccttgctctttgtacatggtcagcagcggcagcatatccatgttcagatcttcgcgtacgtgcgctctgtgccacttcgcccaaaaggtggatttagtttttattcccggcaccaggtcggcgcgcgcatcgcttgaaccgttaatgacgccatccaaatcacaaatcagtagtttcattttaattcctcaaccaaatccgaacgaacaactctggcggaaaacttgttacacacaagatgccaatttgcggttatgacaagccagccggtaaggtccagacccaggatatattccggacgtgacactcgcttcacacgatcgcggcgtgggtcgatgttatagtctctttgcattcggtctactaccgcagggtcgcggtcaacgattaagatattcaaggagttctccttcgctcattatttcaatttgtgcgctgccgatgggtggcgcttcgtcaaagattatcaattgctggcacttgttattgctaggcccgacttcgccggtgacggcgtgtataaatctaatccgccagtccagaagaattatcaggtttgcagtcttccgggccagcttcgcccacttcgtcgacgtgtcctgattcagtagcatgacagtccggcgtccgtgcgctgcacactcgacccacggcagcggatcggaatacggcggattgcaccacttccaccctttcaactctgaccagtccacatcaagcgcgctgtgctctgccgtgaagtaacgcggtagcagatggttggcgtcgcttgccgccatatcgtaacggaatcggaacttacggcgcagcggtttgaataaagctggcggcgtgcgccagctatctttttgctcactcttctgcatgacctggatctatcgcgtataaagggactttattgccggttttcataacgcgctggacgcgctttgactcctcggcgctcattgggcgcatatcagtgctataaccaccgtttgatgtgtgccgccacgctatcagcaccagatctttccggtcgatcttagactggcggcccttcggtcgcacgtacgcctcggcccgtttgcaatgctcgcgcagacattcggcagtgatgcggtttagcgcgacggtggttgtgtacccagtgcgctgcataatacccatcaactcatacagcagttcgaagcgctcctctaattccttgcgcgccttctcctcgccttcatagctcgccaggtaggtgtccgccagcgcgttcgcgcgttcggcctgttcgcgggcttcgaggcattgcgcggcccagtaatttttctcttcttgtaaaattttcatttatttaatctccgtagtgcggatttccttgcgaggaataaatttgccgtctttctcgacccagcaagttccgtaacgccattgggtattacgacctgtttgctcggcatatacggtcttgcattcgtagcgttccgtgtagtaaatagccgcggtaggtacgaaaatacaaacggcaaacatgagggtgagtatcacccaaaatcgaaggtcgccgtcgtagtcgaaaaataatgatctcattgtgtcgtctccgggtattaaaaagggcgtccaaaccggacaccctcaatataatgcaaccaatatgattatgcaaccaatttacgcataaaagttcgggtcgcgtgcaacgtctaccaggtaaaggttgcttatgcggttgccgtagtgccctggagtgcgctggcggcacacaacggcgaagcctggagggattgtattgcccgtctcaataatccacgccacgcgtgcgccggacagcgtcttgccgttgcattcgatacgtgttccgccatcggcagtgttgatgttgccaattttgcagccggtggatttcaggcgaattacgccggttttgctgtcgtaggtgaatagctggttagtcattgcgaccgaaaagtcgatggcttcgaatgaagtattcattttaaattttcctcgttaaccgctatcgcgaagccgcgcggagtgagcgaccggattaattttgtgcgggctgatttgcctccgaggcgactatactgcttcgagtaccctttttcaacgaaaacaggtctcttctcgggcatacggaagccgttgccggtccataagcaggtcagcttcggatatgagtcgcgggcgttgatgtattcagggaacaacggatgtacgtcatcctccggcagatatcccccatactcccacgggtcgaacgagtgatcaggcttgcgccactgggtggaaagcacactgcgcggattctcaatcatatatggcacttcgaagaagtcacccaggtaagcggcgatcttcgcggtgcgcaccgccttaagctgaaaggctgggtcttttgcacgcttgcgcgggaaagctggagcgccgctcaccgccagatccgtgcacggagggaacgcatagatgatatctggcgtaccaaaatcgccattcatcgcgcggtccacgaagtccagatcgataaactcattgcgataccggattccgcgaccatagatacgatagtcaaggtaagacccgtgatcggcttcggagtagttaaagcaataacacttatgccccatctcggcagcacgctcaatcatcaaaccgctgccgtcaaacaatgaccagattatcatttgcgcgcctttttagctttcatgtattccatcaagtcgtcttgaatatctcgcttgctgtcgcgacgctcggcgaccaattcgtccagtgtcccgcgcgcctggataatgtagacgaataccggtcgagggtgtccggcctgcatctggcgaaccggcccgatacgttcaacgatctgcgaaaagtgctcaaagttccaggtatcggagaagattgccaggtgatgtccgccgtcctgcaagttaaggccgtggcctgccgatgccgggtgtgcaaacatgatggggatctcgcccctgttccacgcttccatatccttattgccctgcttacccttacccaacgcgacgccgtgcggaaatttcttcttaagacgtgccaggtcatgcttatactgatacgcaacgagcaacggcgcgccgttcaactcctccacgatactttccagcgcgtccagcttcgcgtcgtgaatcttcacccactcgtcggtccgttcgccgtcttcatccaccttatacacagcgccggaagcaagctgaaggcacttaattgtcttcgacgcagcgttcgccgcttccactgttccgctttccagttcggcaaatagctcgctttcaaactggtcgtaaatcttgcgggctttcttcggcagatccacaacaaccggcgtatatattggcttgtcacatccgaagtattcagccgcgtcaacggtgagggatacatcagacaggcgttgttgtatttctttctcggagttctttagcggggcgtgctgcatagtgaagctgccaggcttaaccggcttgctaatgaaccagcgatcggtaaatgccttataactactgccgagtcgttcgccaccgtcgacaaaccacgtctgaccccataagtctttcagcccgtttggcgctggtgtgccggtcagattaatccagcgcttgacgtgcttatgtgcgatcgccgccagtgcgcgtgcgcgcttactaccctgcttactgcggtagcctttcagcttagtggattcatcggcaacaacgaccgtaaagggccacgcatcgccgtaatagtcaaccagccactcaaccacatcgtagttaacacaaaccacgttagcgtcgctctcaagcgctgcaatacggtccttctccggcccggtgccgtctacgaccagcagggatgagaaccgccatttctcctgttccgggggccaggtgccggatgcaacgcgcagcggggccagcaccagtacgcggtcctcctggttcgacaggatgccagtctggaacattttattcagcgcccacattgtcgcgccggttttaccggatcccattgtcgcccatatattacatcgcttatgcttgaggatgaacgcggttatcaacttctgatattcgcggcgtcggaatcttgccatgtctttattccgcctttttccagacttcagtttcactaccccagttcctctttgtggcgtcgtagttggtggcgtgtccgacgtggacaccggtagcccggaagctcttaaatttttgccagcacaccgtcaacggcagcggatcattcatgcctgcgataaaccatacgcgatcgcctggtttgcattcgcccagcttggtgagtcggtaatgttctttcatcgtcatgtctcccaaaaatggcgggacaagcccgccatattgattattcttgttctgcacgatagcggcgctgccgttcgcgctctttcttattgcggcacgatttgcactcggcccgatgcccgtccgggctgcgcgcagtcttaccggtgtatttgtggaactgggacagcggcttgatgcagccgcaattactacaacgtttttcttcaatcatttctaaaatcctcgatagtgccaacctgcacactataccgctacgcgaccaattcagcaaccaataaatcgcagtcggctatgttgtcgataacacgaacgtccgcaccgcggcgggccattcgctcatgttcacgtacctggtgcggcttcggttttcctccggggcgcttcacttcgacgaacactattttgccgttgatgataataatcaggtcgggcgcacccgcgcgcccctcccatgccagttttcggcagaatccgccaacatctttcacccgtctcatcaggtggctttgaatcttgccttctggagtcattacttcctgtacctgtacataatgtcgccttcggcggcaagggggaagcctttcgcccatataggcaggtcgcacatcagcgcgcaaagctcctcggtcgtgtagtcgtcggtgtccggcacttcggtgatcaattcatcatgcaccgatagaacgatttcatagcccgcagcttcaacgccaggcatggaccatgcgagaatatcgcggcacaacgcctgtacgatgttctccgtcagtttgccgccgtaggtgtactggaacccccactggcgcgtcgtctgattctcgccctgatatttaatgcgggtgctggtgcgcttcttgccggtgtcttcgtcaatctcggtcgtgaccgacagcgcgatgccggggtaactcatgatgcgccccgacggcaactcaattttcaaccaccaccccgcggcgttcgggtcgtcgcgctcctcgtcaaaggttgggtcgtgcttcgccttcgtacggacaatcttgagcgcttttctaccgtccgggcgaacggtagcgccagcccagtatgctttgcccggattgcgtattgcacacaacaccgcgtcctcaagctcggcccaaaaggctaccgtcttcgggtgcgcctctcgccacatgcgtttaatcgcatcacacgtaagccatacgtttttcggcagtatgtaagtcgggcgctcgtccttcttgcccggcttcggcggtcgcttcgcttcgttaatgcgggcgtactcataaccccgtttagccgctgcccaaatgtgatcggggaatgtgcccttcattacgtccgccatcgcgtaaaggtcgaggcccaggtttttagcgaactgcaagaacgccgcgacgccgccaccatagcccagccccaattcgcacgccttaccgatctggcgtaagtccttgcggttagctttaatgtagtccgggtccaggccgaacatcttaccggcagtctcacaatagatatcgcgaccggccttaaacaccattagcgcggttttctcgccagcgatccaggcgaggccacgcccttccacgttggaatagtccgctacgacaaacttcttacccttagccggaatgatgcacccgcgaacggtcgaggcggtcagcttagatatgtcatacgcccagtgtgcggtcccgcgtaacagggagttgatgccgttggtgagcatgtgcgaccggacccaaaacgagacgtcgctctcgccttcgcggcgcttaatcttcccttcgtggtcgtcgctatactcgccgcgtgccaggttttgaggctggaagcctttaccggcccagcgtagcgtgcgctttgcaccaccatactgaagacacccacggcgtctaccatcggcagacagaccattaacgagcggattgtacttagtcgatgccgttgatgacgcgccgaggcgcatttcgataagcgctttgccttcgtcggggaagtccgggtcttcaagcaagtcgttaagtgtggatttctgcgcgttgtggatcgtgaacgccggggcgatatcacgcaggattggcaggaagtcattgcctgtcagtttaccgccaaatcgctcccaggcttcttccttcaattcttccttatgcgcctgcaccgctttgatcgcggcgttcgccagttcaacgtccacatagaagccgcggtcgttgatcaactggtcgataagcaggatttcatcttccttcggagtattaccccagtccggtatgcgccagtagacttcacgcattgcgataatatccagcgcggcatagcgcagaaatttggcccattcttccgggtgagtctcgcgggtgtatcggcggattttgtaggtcttaggggtgggcttacagaatcgtttaatcagcgccttgcctgccttatccttcgcgtgctctgcgtcaacgcccagcacctggcactgcatatcgaggctaccgggcagcgcgtggcgaaaggccataatcatggtgtcttcgatctggcttaccggcaggtcgattccccacttctcacggataaccaagcggtcaaacaggaggccgttagccatcacgatttttgctttcttgcgggatacctgacggagcgccttgcgcagttcccgcggcattgttggggattcagtggcatcccatgtctgcacgcggccctcgtcgatggcgtatgtgcaaatcataatctcggtggttgggtgctctgcgtaggcgtacgcccctactttcttcaggtcaaccccgctgaatgtctcggtgtcgagaaacaggcgttcgaagtctttcattgcttaatcctcactacggcgtcggcgctgccgatcatggagaagataccgtcggaaagggttatctcctcgccgttgttgcgaatctcggcaacggtgaaatattcccccagtagcttggaccatactcgcattccgacttttacttcgctggctttaatgcgcatttttcattgtcctattaaaaaagcccgcattaagcgggcttgaatagtgggctttgcccttaacggcggcgacgtttacgtggtgcttcgtcttcgtcgtcgtcctcatcttcgtcatcgcgtggcttacgacgtttacgaggtttctcatcttcatcttcgtcgtcgtcatcgcggcgcttggattttttggacttgcgcggcttgtcgtcttcgtcatcgtcatcacgacgttttgactttttggacttgcgcgggctttcatcttcgtcatcgtcgcccaggtcttcgtctgagcaagaagacccgccaccgccgaaggcttcgccgtcatcgcggaagcgcagacccaaaagaccagcaccgagtcccttgccgttggtattgttccacgcccaaatatccagggacacattgcaataacaaccggagtagatctcctggccttcgatctcgtcgccttctacggtcagaccttgttccgtctgcttctcgccgagtgacgtttgaatgatcggctgtttgaacgatttggcgttgatgtacaacatgccttcgaattcttcggttacttcgtcgcgctcgtcaccgtcgcgaactgcgcattccttagaatcctgggcgtagtggcggtccatccacttatcagcattcttctcggatttcagcttgtcggtgagcactgcgcgcgctgccgcttccactttgtccacctgcggatcttctttatcaaggagaatcactgcacggtatgccggtttttgtccatcctgtttaggggtatcacgttcccaaattttaaggaaacatacgcgcacatttttcaggttgactttagccattttccaattcctcattttcacatgtatcggggttattatgagccaccccgttcggcttggttgctaatctacttggttgcgcctaagcggtcaagcacttttattaaaaagatttctggtcacgtagttggtagcgttctcgacccagcttaacggcggtcggtcgatgttcttctccacccagtcgacggcagcgtcactatatccgtcgtcaagccagcgggtcggatggcgaatcatccaggctaccattaacacgccttgcacgcaatgcaggataaagcccagcgcgccgagcaaaaacatcaataagatcgcaaatactttattcattgcttaagtcctcgtcagtagcttccgaccacgcagggcgcgggtcgtcgatcggtgctaacaccggtttggcgggtgcgcgcgtgattttagcacacagcttcgcccacactttcggtttttcgtccttcagtaccttctcggcatcggtcgggctgagcaatgtttctttgtacatcacatcgcgcttgatccgggccttcgtgaagatttcaatcacttcgctctcgtccgcccacttacggatcccttccttaccggcaaccatcttgaggcccagcgattcgccatcgcccgccatgaccgccttgaataccgcggactcgatagccttgatgtgctggcgcatcgcatcaaggccttcataagccttgcgcagttccgccgcgctcatagcgccgggggccgcttctttcttaccacgcttcgcacgtcgggccgccttccgggcttcgcgggccatattgcggtcgtgattggcgcattcttcctcggtcgccacgctcacgtcgtcgcccaggtcttcgtcggttgccgttggcggtgtcatcgtgtcgattgcggccttcgcccggacgctgcactggtccgcaaatctgcaccactggcacgcatcaacgctgggccggaagtctgcgcgggtgagtcccttcttgcctcgggaatacgcctccagtgcggcaatagcgcgcttggatgcaaacttcgcgaatatctccagcgcttctaccgaaatatcccactccgacgccccgccgcaatacggctggaagataaccaggcgaacggtcgtaatgtcgtacatagtttgcagcttgcgtagcaggccgagcgcgtacaacataagctgtttgttttctttcgcctcgaccttatgccgcccagtcttcaggtcgccaacaatcagcatgtacgtgccgtcggtcttcttcattaccatgaccatatcggcagtaccgaacgttttaatcctgttgccgtcgatctcgaagcctgaatgaaggacgcgggtcaggtcggcgcgcatctcaagctgaacaaactccgccacttcaaggagcggtcgccagtggtcgatgtatgcatcgcactgtttcaccatatcgtcgttgaccagtacgccgcctttcggtgcttttgggtgggcctttaccggtcccttgccttcgttctcgacgtaacatcctttatacgtcttcgcagttattttcttctcaccggcgataatgcggtttagcacgacttcagatacggtgtgcatactcgtaccgttaatcgcggcttgcccggattcgttcgggatatctttttcgaccaccagggcggcagggcaacccatccattttttagcaccggatggtccgagtaatgaatgttccgtattgctaccggattgcgttttacgttttggtttaatcgccattattccacccttgaaaactgagctatataataatcgtgtttaacatttgccttcttcgctgcttcgttcatggttgaagcaagttcgctggcttgcgtccagcagctaacccagttctgattcataacgatttcgggttgctcatcgccggtaatacggcagcgaaataaaacaaagaatgtagccatttattttgtctcccagcggtcaattgtttttgcttctgatgcaacggcgaatcgaacatattccaggttggaatccgcccaaatataaaagtcgggattagtaaaggtggtgcgcttaatttgcgcgggggtgttgcggcgtttatcaattacggcaacgcgcgattgaaagctgccgatgcgttcgaatagccaataatatgggcgctggtcgcgggaatccaccgcctcgattagcgtgaagcgtgccattgtctcgtcctctaaaaataggcccgcagattagcgggccggataatattaatcttcaccgccgagttgtatataaacctcgtccgggtcgtcgcctctttcttcgcagaaggcggtgaatgccgcccaattttccgctatgaaatcgagcatgattctcatttcatagtccatgatattaatcttccagttcgaaataagtttcgacgatttcttttagctctttgtggaagtcttcgacgtcgtcatcttccagcttagcgattgatttgatctcgaacgattccagcaggtcgtcgaattcgtcgttcgcatcgtcgtcgtcaccaccggcaataatcgcggcatactgtttgatctcgtcgcgcatctctgccagcggatcggcatctttcttgcctttgccttttgccggtgcttttttagacttagccggtttttcgtcttcggcatcgtcgtcatcttctacgacttcttttttagccttacctttcgccggtgcttttttagatttagccggtttttcgtcttcagcttcatcgtcgtcatcttcgacaacttcttttttggccttagacggcttcttatcttcctgtttaccaacggcagcgccaacggcttcataatgctttgcaatggtttccagtgctactactccgcgagtgatcaggtttacgatttgctcaaacatggtatatctccgattggttaagtttaggtgtcggcagttaacttcgtcggtggccttaacatattgccaggttacgcgttctcccgttcgggtagtggacctggttatataatcacggttgggaatcctgacacttcgatccggcccctgcgttgcccctctccagtttgcgtcctgcatcctgtctctccagtttgcgatagattggttgtcgacggagtgaatgatagattggttgcaggatgggtgtcaacaactaatttcaaaaaaaagcgccgaggcaaaatgcaacggcgctaaccaataagagacaatgagacgggaattattattacacgcgtgcgcgcccgtttcaatatccaaaggatttgacaccttgtggttttaggtgtagtttcattggtcattaaccaacaggagactgaattatgaatatcaaagaagcaattgaagtgttatctaatgcaatccgcggcgaagcgggtaaatcctggtattacacaaatgcggtggatactctgttatttgaagtgtccagattatcgcgtgctgagaaggagcttaccgcgaagctggaattgctcaacggcacggcagcaagcaagctgcaaaaacacaatgaagaaatggaagaatacaaaaaacaggttatccgtctacgtgaggaaggtaaatcctgggcgatgattgccgagttgaccggaattaatcagagcacagtgcgctcctgggtacgcaataataaaacttctaagtaaggccacggcaatgagcttaattaaattcgctgtaacaagacccgctaaaaaaggcgaaaaagccagggcggaaaacttccagatgacgaccgatgaatttttcgaatttatcaaagatgcgaaagagatatcgtctgtgcatatcaacaagacggaagataaagccgagtatgcgcgccgcaagcgtaaggccgatggcatcgtagcgtataccagtgacggcttacgccgcaagaccagtgcggtggaccgctcgatcctgttcttcgatattgaccgtaccgacacccgcaccctacgccgctgccgtaaggctttcatcgacgcggggctggagcacgtatttcacaccacaaccggcgaccgccacccgctgaaaggcggcacgcgttgcgctcgattcctggtactcacggacaagcctgtaccggctgaagacctgggccgtgtccagtatgcgctattacaccaacttggtctgtcagatgtggacttcgacgattgcacgaaagacacaaaccgcctgatgtacctgccacaccagcagtctgttattaagtgccactacggcaagcgtgcccgcgtccgtcgtctgcttcgcctggctgataagttgggcgtggagaaggaggaagtacgccgcgagcttacccagggcgacgacgcagtggcagacggcattctggactggtgcttccaggcaggattcgaggcgttatcttccggtcgcggttatgaagtgccgtgcccgaacgaacatctgcacagcggcgaagggtcgacggctatcatggtcaaggatggcgagatccgtttcaagtgtatgcacaccggcaacgagtgttgctcggaactgaacagacaccagcacctggcgctacgtcttatcgggatcccggaccacctgaacgtcgagccgcacaacatgtcacgtaagcaaatcgccgccatccttccgggactggacgatgaggaagtggaatcgtgctatgaacatatcgttgatgcggtcggagacggcgacgagtacggcgtgtgtactgatgcagacctggacaacgagccggtcgcactgttcagtaagcacgacccgatcatcgaaggcctggtcaacttcaaatcgacctggtatctcgccggtgagtcgaacattggcaagtcgttctacgtgctgggccagatggcgtcagtatctgccggtattccgtttggcggggcgaaggtcgtccagtgccacaacttctatttcgatgcggaaggtggcgaagcctccaaccagcgtaaggaagcactgcagatcaaatatgagcacgacctggacaagctgcacattatcgatctgcaatcacgcggctgggatatcaccagcaaatccggcttgcgtgaagttatcagcttcatcaaccgcaccgctaacggcgagccggttggcctggtggcgttcgactcactcaaccagactgttgcgctgcggtccgccgatgcaaaaccgttcgacgagaacaacgccagcgatatgggcgaagtggtcaaagcgctgaaggccattgcggaaaatacaggcggcagtgcgggcgtcatccaccacccggcgaaaggttcaaacggcagcagatctccccgcgggtccggcgcgctgcatggtgctgtcgattctgcgttcttcctggaacagccggacgacaaccagcccggacaattgaacctgtatcatgagaagtcacgtaatggcatcaagcaagcgccgcgcggattcgtcctgctcaagtgcaaggttaaggtggatctccgcaagtccgaagcgttcgaagcccaccagtccaccagcaccgggccggacttcggtgatgtggttgccggttgggacgtcaagccgatcgcatccacgccacgcgacgagactctttacctcgtacctgtcgcccttgcaccgttcgccatcgaacaggcgaaggccgcgggcaaggccgcagttaaggaagagaactccgcaggaccgcgcaacgaaaaagagaaagtgctttatgcggcactggaaaaactgatggaagataacccggaccataccggattcagtaaatcggcaattgtccgccaggctgggcttgcgaaaggtggcacatcgacgaaggcaattgacgatatggtggagcgcggcgtgctaggtttttatacagatccgcataccggggccatctatgggtcgtcgaatatcgtcataaaaacgaatatacccatcacgctttcggcgaccgatgacgaccttaaagattaaattttgcgcgcattggttgccgatatgtggattcccatatcgctaaaagactaaattttgcgcgcattggttgccattttgagtgtttttatccagtcgcattggttgccgtgtagtgtaaatatattgaatagttatgcagatttcgtgcataaaccaaacgggacagaaagcgggacaaacacgaggcgggacaaagcgggacagcactccagtcccgccccggatggcgcggcttccggaggagcgggacagcgggacagcaccccagtctttcagactagacgggggtcaatggcccccctcgtctgagactgaataaaatccggagattgcaaaatacacggcagcatgatgcgaagtgcggccgacgacgaactaggcaaccaatgcaggttgtattatgctgagtgaaaaatgcggtttgcagtcacagcagatagcgatcaactttttcatgcgcgtgattaatattggttgcacccacccaggcaccctgctatattggttgcacaccaacatgaggacagaacaatgaaagcgattatctggaattacgcaatggcgatggcgaaggcacaagaagcggcggagttcgccggtgaaggagcggaagcggtcgaaagactatcggcagcgtggtccgttgttcgcgtcacgcagcaggccatcgcctgtatgctggagcgccgcttcgacacgatggcggagatccagccgttggcgaacgcaatccaggactacgcgcttgcatttgcccgtgagcgcctggcgtatcgcttcggggtcggtgagacggcagcgacaaacatcgcccggattaaagcccagcgcgaactattcgcccagcttgcgaaataaggggccaaaatggaccgcagacgagctaaacagctttcgtggcatattccactgcattgcatacgaatattggctaagaatgcgattgagggtgattctgtgttctggagctatcgcgacgatgtgaagccactaacgcagactcgctatctgcaccagttcgccagggagcacggattcgccgtcaaaacatccttgcaaccaattggcatccgtattacattacgccggaagcccgccgttgagcgggtaggcaaacactggagactgagcaaatgacaccagcactaatggcgggattctcgcagaagtttatttctgttgatgcctgcatagcagattatgagatggacggcatcgctactgtatgcgatggcgacacgaaaactgccgatgagattgaggagacagagcaatgaaattactattccgccgcaaatcggacgggcgcattcttaagccgatacagaccctggacgcatacgtgcgcctacaacaaccggcaaacaaaaaagtattccgcgcgccaacaagcacgctgccgcagttcttcacggtacacgcccacgatatcgagcgcggagatgtgctgcgtgatattcgcgacggcagtatgtggatcgtcgagtatgtcgggcttcatggcctgcgtatgcaatcccgcaaggatggcgtagccggtatgacttacttcggcctcgtaaattacgagcgagtgggtcgcaaatactgccttcgtgaccgccagccgcatgagcgcgttgagttccgcaagtcacagccagcctacgcaacctacgactcccaccaggtgcaggcgaggatgaaacgcgccgcgcacgaaatcgtcaatcgctttgatgccgtgacgaatgcgcaacgccatgcgcaggaatacggcgtcggattcatccgggtggaacaagacggcagcatgaaagccatcgacccgcgctcggtgattctgaaatgagcgcgtctatccgtgatatgctgatgcataaccgctttgaggtaggcggtcgggtatttcgcaattacttcgtggcgcgtgcatgggcgcgccatattggcaaaccggaaggggcaattcgatgttatacgtcttcgcggtagtatgtggcggtagtctggcggccctggtgctgttggcgtcggttattagtctggttaaatacctatggggcagattatgattcatgatgtgatttattggtttggtttgatctgcgggctgtgcctgcttaccgcggtgctggtgggcgtcctgatgttcgtagtatggcccgccgtggaggccgccagcattacccgcatgacgttcgagatctacaagcgccgtggaataacggagcacccgaccaggcttcgtatgtggtggctatggtaccgggatatgataggcggtcgaacattcgaagccgtcagatcgggaggatgggagtggaaaggcgtcggcaagtggtccattttcgattaattatgcaagcgtgatatagtcccagtgagataaaacttactgggacttttttatggataagctaaacgagtggttattcgcccttgcgtgtcttgctggcggcttcgtaggcgcacgcattcatggcgaggcaacgaaagggccgttgaacttcgttttatatgtcgtagttggcttcctgtgtgccatatttggcgcaccggctattgccgagtgggctggtttgtcgggggagcgcactgtcgccggtttgggcttcgtaaccgcaatcttctggatgccaatcgccgaccggatcagggagactattgcgtcgttccgacttccggggggtgcaaaatgattatctccgtcctgttgtttgttatcatcggggcttcgtccctgtttaacgtgtatgcgccgtccgtccgggatggcattttcggtcgggtgctgtatctgttaacggcaatggtctgtattatcggattgctgcaaacaggcgacgtatcggataccacctggaccgcgttaatctggctgtttgcattgcgcaccctgcgtaatgctgttttgaatggggtaaaacatgcgattcagtgacaacggtctacgatttacggcagcatgggaggctttcagcccggtgccgtatttcgcgaccaagaaagagcaggcccgcggcctgtacacctggggctatggtcacaccggaactaacccgccacgaagcattacccgtgcagaagcgctggaactgctcaagcgagatgtggcgtatgccgaggactgggtgaacaaatacgcacatccgagcattaaccaggcgcaattcgacgcgctggtggacctggtaatcaatgccggtcctggtccgatcgtaccggatgacgtcgcgaatgatttcgatgatgcggtgcgactgggcgactgggcgaaggtacgagctactctgccgcagttccgcaagcaaggtggcgaagtgcttaagggtctggtgcgccgtgcaatcggcaggcaagcgctattcgatggtaagcagtgggacgttgccgagcgaatcgggcgtaacgcagcataatacgaggtaacacagtatgttaaaaagcattcttgatcataacgctgacgcgctcgccgcgctggctaaaaccgaagaccctggcgcacgcgctatcatcgcggactctatcaaccacgctggggtcttcgatgcgaagctgccaagcccgccaccgccggaagaacccggccccgcagcgtaaacaatcaagcccggataataccgggctttttattgcttgactcgcaaccaacatagacgccatactgcaaccaaccaatgagaggagtaatcaagatggcacgtaaagatatttgggtattagcgatctggaccaccgcggcttttatcggtatggttatttgcgaattgctataacccgccgcaatatggaccgtggtatattgtcctcggtcccataatcaggaagtggattaatatgcacccgcaaactaaaatcaccgacgagcaattgatcgccgagttgcaatccggcactaccgcgaaagagattgcgaagaagtacggtctttccctacgaaatgtctacatgcgcaaagcccgcctgtcgaagaaaggtattggtcatggtaacgatgccgtaatccgtaagcgcgttgccgatggcttcggcgttaagcgcgtatccgccctggtgcgcggcaatggcgaagaggtcatgtcgtgggttatcactgagcaggacaaggagcgccagcttgaagccatgcgcgctgttgtcgagggcatgaacagcgaaatcacaccggcagcaccagtaagcgccccgccagtcccgatccaggcgctcgacctactcaacctatacactgtgtcagacttccacctgggcatgttggcctggggcgaggagactggcgaagactgggatatggcgattgccgaagacctgttctaccgctggtttgtcgaagccttcgcacgcgcaccggacgcaggcactgccgtaattaatatcctcggagatatggcccactttgacagccttgacgccgtcacaccggcaagtggtcacgtactggacgcggatacccgctaccagaaactggtccgctacatgatccgcatggtgcgcaacgtggtagacctggcgctgcaaaaacaccacaaagtcaaactgctaatcgtccagggtaatcatgacgagtcaggcatgatttggcttgctgagatgttcaataccctgtatgagaacgagccacgcgtcgatgtggacacgtccccggacgtctacaaaatggtgcagcacggtaagaccacgctatttttccaccacggacacaaagcgcgattcgatgttatcgagcaggttatgatcgctaaatttagacaggcattcgggtcgagcgaatacagctacgcgcacgtaggccatttgcaccaccagaagattgttgaatcccgcaacatgattgttgaacagcacaggacgctcgcagcgaaagacgcctacgccagtcgtggcggatggatgtccggtcgcagcgcaaacgtcatcacctatagcgccaactacggcgaagtagcgcgcttaaccattagcccggaaatgttgaaatgatcagacaagtattcatgagcacgcaggccacccgcctgaaagaactacgcaaacaactcgaaggcttgcgccgatttgaacgaacggcagcggcagtcggaatgtcgatggacgagaggatcgaaatactgtcgcaaatacgctacacagaaggcgcgataagagaagtacaaagcatgttaacccgatactacgggcgcgacgtttaaaccgcatagcctgccgatttggtgggcttttttgtgcctgttataatcccacttagatggcagggccgtctcctatgttgccgatggtcggcgcatatgaacaaaagggcttatattatggcagaaatcaaagttaagggccgacgcgccaaactggacggacgagtagcagtaaccccgcgccgtaaaccaggcgagcaaacagagcataccaatctcggacctgaaatcgagtacggaaagcgccgtaaaggcggcaaatgtggacgacctactgactaccgatccgtttactgcgaccagcttcgccgctattttgccgacgccgacgcctggcaggtcaactactccgataaaggcgctgcgcaagtaatccctcgcaacaaaatgccaaccttcggtcgatttgccgcggaaatcggtgtgggcgtcgcttgcctgtatcgctgggcgcgcgcacatgaggagttcgccgaggcgatggcggacgcgatggagttgcagaaaaccttcctgatggaagctggcggcgtgaccatcgcggcgggcttcgcgaccttcctgcttaaagccaaccacggcgtccgcgacgatatccaactggatgacgacgaagatgataacggcgatgttgttgtcgaacctaccggcaaaggccagggcgaataatgcgtaactatgcggcagaacaccgcgcactggaacgcgcgatcgcaaagcgcaacagaccaccacgcccgacacgcgttgcgcaggcggtgcgtctttaccagcctgattgcctaccgcaccaggttgaactactgcgggacacgaagactaaaatcctcggcctgtgctctggcttcggcggcggcaagtcatgggtcgcagcccgtaaggtaatccagcttttaaccctgaaccctggtcatgatggcatcgttacagagccgactattccactcctggttaagatcatgtacccggaattggaaaaggctttcgacgaggctggcttccggtggaagttcaacaagcaggacaagatctatagcgttctggtgaaaggcaaatggactcgcgttatctgtgagtcgatggagaactatacccgcctgatcggggttaacgccgcgtggattgttgccgatgagttcgacaccacgaagcaagacgtcgcaatggcggcataccacaaattgctaggtcgtctgcgtgcgggcgtggtccgtcagtttgtcattgtatccacgccggaaggcttccgggcaatgtatcaaattttcgaggtggagaaggatagccagaaacgtttgatccgggcgaagaccaccgacaaccaccatttaccggcagactttatcgacacgctgcgcagtcagtacccggccaacctgattgatgcgtacctgaacggcctgtttgttaaccttacgtcgggcgcggtgtacaagatgttcaaccgcgaggagaacgccagcaccgaagaagtgcagccggacgacacgctgattatcggtatggactttaacgtcactaaaatggcggcggtcgtatacgtccgacggcagcgaatcacagagaacaaggagttccgcgacgagattcacgcggtggatgaatttgtggacctgttcgacaccccggctatgattgcggcgatcgaggagcgctaccccgatcattgtgccgccggtcgtgttgtcgtctacccggatagcagcggcaaatcccgcaagacggtcaacgcgtcgtcgtccgatatcgcgcaactggaagatgcgggcttcaatgtggaatatgacagcgttaacccacctgtgaaagaccgattgatcgcgatgaatacgatgatgtgcaactcgaagggcgtgcgccagtattttgtcaacctggataaatgccctacactagcgaaatgtctggaacagcaggtttacgacctgaagaaaggcgagccggataaaactgccggtgtagaccacatgaacgatgccgcgggctaccctattgcgcacttgttccctgtgattcgtccgatcgccgttgttccaaccgtagacttctactaaggaaaccaaccatgaccgttaacgttgacaaccagcacccgctctatgcgcgcatctcgccagagtggaaaatgatccgtgattgtgtagcaggggagcgcgccgtgaaggcgtgcggccccttgtacctgccgcatccagcaagcggcgacaccaccgacccgaaatcacgggcacgctataaggcatataagcaacgtgctgtcttcctgaacgccaccgcccgcacactgaatgcactattaggcgtggccttcgccaagcctgtgagtatggacctttccggggcaatggctgacctgattgatgacgtagacggcagcgggatgccactggcgcaactcctgcgcggcgctatgtcggaagtgctgcaatcgggccgcgctggctttatggtggactacgaccgccaggctaactttgatgaactgggtaacgtagtgccgcagacagccgctgaaatggcgacacaccgcccgcttatccgcttgtacacggcagaacagatcatcaactggcggcagacccacggtattgacacgctaatcgtgctgaaggagacggacgaaatcagcaccgaagacccggacgacttcgcaaaccacgaagtaacgatctggaccgagcttcgcatgattgcaggtaaggcccacgcccgccgctggttttacaacgctgacacgtccgaggtgcagatggacttgccgcgaggcttcacccgcaccgaccttgtaccattggtggatgcctccggtaatgcgctaactcaactgccattttgctggtgtggcgcggtggacaacaacgcgacaccggacgccgcaccgctggcggatattgcgtccatcaacattaagcactacaacgccgaagcggacgtcgccgagattgcgcacatcgtggggcaacctaccctcattgcgactggtcttacccaatcatgggcggacaagaacctgaaaggcggcatcgcgctcggggcaactaagggcgttatcctgggccagaacatggacgccaaactgcttcaggcggaggagcgcaacttgtctgttgccctatgtgagcgccgagaattgcaaatggctaaactgggcgcggccctggtcgagaaggggaccgcacctaagacggcaaccgaggcggcctatgatgcacagactgataacagtatcctgtcactgattgccggtaacgtcgagaaggctttcaaccgtgcgctgcaaatcgtcaagctgttcacgggcgacaccgcagatcaacgcgtaacgctgaataagttctacaccgaaatcacggttgacgcacagcttatgaccgcaatgatggcgggtgtgcagactggtacggtccgtctggcggactttatcaagtggatgatggcccagggcgttattgatgactcgcaaaccgtcgagcaggtggaagacgaactgcgaaatcagaatccattgcctcaaatgtccccggatgcggtagaatcgaccgaagaagccccggacgaggtagcggacaatggcgaagacaattaatcaatatatggcggatcgaatgatccgccgtcacatcttcacccagcgcctgagtaatgaccaggcgcggagggtgttggctatgtgggagaagttccggcccacgttactgggtaagctgaccgagttacttgatggtaaaaagtccatgaacaacaaggcacttaccactctgttaacgcaactcgacaagaccgtcaaaacggaactgcgcaccgagtttaaggcgttggctgaaagccttcaggagttcgccgacaccgaggccgattatctcgccgacacattaacggcagcgatccagccggtggtcgccgtaccggcggtcgaggtggttggcgtagtgaccggtgcgcagatcgcagcgacggcaatgaaaaacccgttccagggtaatacgatgatgcaatggcctgactcactttctgagtggaccaggacgcagatcggtaatcaggtgcgggcgggattcatccagggcaagccaacgatggaaattatcgcggacgtgaggcgctcgctaggcggtcgtagtgcgcaagccatctcaagcgttgttaagtccgcagtaaaccactatgcggcgactgcccgcgaactaatggtaaaagcaaatgacgatattctcgagggtcgccaatggttatctacattggacacacatacttctcccatgtgccagctacgcgatcgcctgttttatccggttgatgttactcccgacaccaaaggaaagcgcggcgggaaagtggtggctggatcacaatatggcgctggtcctggcaagctgcattattgctgccgttcgacggagacgtggaaagtcaaaggtatggaagattggcccagtggtaagcgtccggcactgaaggctgacgcaggcagattgctgagcgagcaggtagacgcgcagactgatttcttctcatgggtgcagcgccagccgcgccatatcctggaggagttatatggagtgcaacgcgccgaccagattatgcgcggcgtgaaagtgccgaagatgtttaccgattctggcgaactgatgactattgcgcagcttaaaaaccgggggttatggcgtgattaaatatgcagcaatcggactggttatcggtctggtggtaggattctggctaggtgactcctatcgtgctggcgtagtggcggaggcggcgcaagaagcgcaagccgaagcccaacggcagcaaactaaagttattgagcgctccgtgcaggccgaacaagcccgcgacgtagaataccggactataacgaaagaggttgttaaatatgttacgcgccctaaccgccctgattgtagttttgatgctgagcgcgtgcggatcaagcaacgtgccgttgatgccgctaacggagtcggcactgcgtccgccgtgcaagttcgatagcccgtccgcagaccccgacgaggatttgatgattgacgtgaaaaatatggaatgtggggcgaagctaagggcgcaggtgctggagttgcagcaaataattaaggggccgtaatggccccttttcgttagcgcggaatgccgcaaatctcgttaagtgttttcacgtccagcgccactgccgtggattttggcttgtccgggtacgggatgaattgctcgacttcaggccatgccttaataagcttcttgtcagtattgtgcaggtccagtacaccggtaacggtgagtttgaacgcatcatacttcgcgcgcaactcgcgacgggccttgtcgttgcggtccaggcgcttacagaagtcatgatctgcagggtagtctacgcgaccgcgagggagatatatcggcagcgctttcccgtcctcgtccacttcgcacactgacgcgagcataactgcctcgaacccaggaacgatatcgccgagatcaggcgctagcttattcatatatttctcttcccagtacccgcgatgtatgcggtattggcgaccgtcgccgctcaatgacaaggtgcgaacattgccgcctgcgttgatttcaaaggttgcgttatagacgctgccgatacccttcgggcggtcggagttataactatacgtcgccttgttggtgtatacgctgacgccgtacatctgcgactggtcatcgcggattaacaggatatgctcgcggagcgctgcgaacgtgcgaatgccttccggcatacagtccagcgtgattgcgtacgccaggtcgcgagagtccatcatgattgttttggcttcggtagcgatttcgtggtcgcgcaggatgttagccagaatctggtttttaatgtcttttgtcagtctcatttttgtgtcctcgttgttggtgtgcaaccaatatagtgcaaccaatacgcggattgcaagcgaattttgcgattatttttatcgctgataatattagaagcgtgaagtcgagcgggtggcctgctctgccacaatcccagggggatagcatgaaacttactaaagcagaatatgacgcgttgccggaaggtatgaaggcgctttttgttgccgatggcgacgggtataaatcaacgttcatgaccgcagaagaagtacaggcggaaatcaagggtctgaaagaaaacaacgcgaagctggtgagcgagaagaaagcagaagccgaacgccgcgccgaagctgagcgccttgcgaaagagaaagaggaagccgccgcgcgcaaaaatggcgacctcgaagcgatcgataagtcctggaaggataagtttgcgaaacacgaagcagatacatcgggaaaaatcgaagcctaccgcaagcagatccacgacctaaccatcggcagcgctgccaaagacctggcatcgaagctattcggtaagaatgctggcatcatgcaacgccacgtaatggaccgcctgacgctggaagacggcgaagatggcagcttgaaagtgcgtgtcttgcaggatggcaaaccgtccgcgctgactatggaagagcttgaaaaagagttccgtaataacgccgattttgcatccgtcctggcaggcacgccagccggtggcgcgcctagcaaaccgacgcaggttgtcgaagatgtgaagtcgaaaatcactatgggccacagcttcggtatcactgaccttacgaaacaggcaggtgaaatcatcgctaagatgggcgacgacgagtaagcagattgcccgcgaaagcgggcaattttgcgagcgcgtaaatctaaggtaacattaacgtcactgggcgaatgctcacaactcaaaggatttcgatatgtctttaacagtgttccagcgtaaactcgttaccgcggttacgcaaatgatccccgacaacctgaacgttttcaacgccgccgccaatggcgctgttgttctcggtactggtgaagtgctgaaggacgttattgagaaaatgtccgtaggcttgatcgccaacctcgttaccgaccgtaacgcctacgcccctgtcggcactccggcaaccgcgaaagttctggcgcgtatgctgaccaactcggttaacctttccgcaaaagtgggtccggtagcaatcactaaggctatgatggctaagatcgaaaccaacgttaacagcgttgcggctgagattgcggcacaggctactcaagcgattatgctgcactacctgaaagctggtatcggcgcaagtaaagcggcgatcgaaagcaacgcagcggcaaaatacacccaaccggcgcgcgttgacggcgttggcggtcgtaccttcccgaccctggcagacttcccgctggcggcttctaagtttggcgatcaggcgtctttgattaagtcctggtttatggacggcgttacctgggcaaacttcattgcgtaccaggcactcccttccgctgaacaggtattcgcaattggcgatctacaggtaatgggtgatggcctgggccgtcgattcattatctccgatgccgctgccgatgctatgggcgctggtaacatgctgggtctggttcctggcgcggttgcagttaccaccaacggcctcgatatgctggcgcaggagaaaggcggtaacgagaacatcgaacgctggtggcagggcgagttcgacttcaacgtggccgttaaaggctaccgactgaaggcgtccgctcgtaccccgatcgaaggtgtgcgctcgttcaaactggacgatattaccacttccgctaactgggaactggaccagggccaggtagacaacgcaccggcaaccgtgcaggacgttggcgctgtgggtgatggcgatactaaaggccgtcgtaagacccaggccgcacaggcagtgcctacccgtcacatcaaggaaacggctggcgtactggttacgctgactgcgactaccgcgtcttaacgggcgcaaatcccaaaggggcgggcttatgcccgccttttttataggagtgaatacaatgtatggtgacccgcaaacctttattgattatgccgctgcgcgaggcgttgaagtcacgctgagcgatgcaacgcgacaccttaccgtcgctaatgacttccttaacggcatcaactggatcggagaacccgcagaccagactggcatcgacgcatggccccgcatcaattaccaatcggacggtaagccggtgcgcgacacgctcactgaagttgtggcagtagtgcctgcagggcagatcgtagattttgcatcaatccccattgccgtcgagcaagccgtttacaggttggcgatgttggtggcggacgaggtcgatatttctcctgttggcagtggtaaggagactatccgtgaaactgtcggcccgatcacgatggaatatgaccctgcgacgattggtagcggtgtctcgttcccgtggtgggatggcttgctgggccactggattggcttagacggcaacgcagcgggtaattttgatgtattccgggggtaatatgaatcctgcattactggcggctattatcgccgcaaatactaaacgccaaccagaaccggagccagcaccagaaccagaaccaccggtacaggaggatgataatggcgggctttaattacgcaggattaaagcggaaagtgaatccgctgattaaaaagttcggcatgaccgttacggttacgcgtcctgggtcggttgaccgcgtagacggcgacgaagtgataatcccgccaacgtcgttcgacgtcatcggtcttcgagaggagtacaagccgagcgagatcgacgggacgcgtatcgttgccggtgatgtgaagtttttgtgtcaggccgtcaagcaggtaaaggtcggggatttggttagcctgaacaatacagactaccgggttatcaatcccaaccccctgcaaccggcgggccagaccatgctgtttcaactacagctaaggggctaacgtggctgaagtctactcgttcgccgccactattgctacgtgggtggataagacgaaggagaacaacgacaaggcggtgcgggcgtacggtatgcaaatactcggacgcctgatcgagatctccccagtgggcgacccccgccggtggaaaattaacagggcttacgcgctcgcccgccagcacgcaaacaaggtgaacgccgcacagcgtcgcaagaatggcggcaaactgaagcgtggacagaagaagcacgcaagtgtgctggtatcattcaagactaaaaacggcaacgtcacgttccgccagcgtggctgggctgcgaagaattacaccggcggacgcttccggggaaactggcaggttacgttcgaccgcccggctgttggcgctattgaccgcgtggacaaggccggaacggcaacattagccgctgggcgtgaagtgttagcgcactatgattcgagtgaatacgggtcgatctggtttactaacaacgtgccatacgcgcagcgacttgagtatggctggagtaaacaagcgccagcggggattgttcgcgtcgtagcggcagaaattaattcgaaggtgaaataatgagcaataccgcaatccgcaaagcgcttaacagcgtggttgaagagttatcggcaagcctgagcacaagccagcgtccgattagggttaactgggagaacgtgagcggcgaccacgcaaacggcagcggtgtctacctggagccgtacctgctaccggccccgacccagtttgtgggcttacagcagaagggtcggatctatgctggcgtatatcaggctgccgtggtgtttcccgcaggaactggaacacagtacgcgagcgaactggcggacgccatcgctacgtctgataagtggctggcggtgaagatttccggtgcgtcatttcagcttcaggacgcgccatacaccagttcagtgattgaagacgttgatcgcgcccgcatcgtggttacagtaccctacacctgttgcgcctgatttggcgctattctgcgcgtgctgtatcattaaaccgtatatctaaacaggagcgttcattatgggttatcaacttcctaacgggtctagcgtccagattgggtccgtactgggcaacggcatcgctgttacggcagctaccaacgccgccgcgtcgatctccgaccttacgcaaggttgcgtaattacctgcgcggagtctcacggtctggctgttggcgacgttgttatgttcactaaaaccccgtgggtccgtgcgctgaaccgcgcgttcatcgttggtaaagtatcgaggaacgacgttacactggcgcgcttcgatactcaagacgccaccaaatacccgaccggtgctttcggcgtaggcacaccaggcgaggtggtgaaggtgtcgagctttatcgacttcccgtatatcactaacgttgctgtgtcgggtggcgatcagcagacgactaccttccagccgttgcaggtgaataccgcgatcagtctgaataccacgaaaaacccgttggtccagacctacactttcacccacgacgaagaagacccgatccgcccgattctggaagacctggacgacacacagaaaaccactgtgattaagttcactaacccggcagcggcaagcggcaaaggtgagatccgcatttacccggctaaggtgtctttccagaagattccatcggctgaagtaaacaacgtggagacggtggagtccactctgaccatgcaatccgatatggttatttaccgtaaggacctggttgaagcgctgtcgtaatttggtcgcttaaatagcgggtgttaatatggggccagtacggcccctttttt

1. A composition for use in treating Varroa destructor infestation in a beehive having Varroa destructor infestation, the composition comprising:
a carrier or excipient;
one or more bacteriophage having a genome with a nucleic acid sequence selected from the group consisting of SEQ ID NO. 1 through SEQ ID NO. 13, or having a genome with at least 70% sequence identity to one of SEQ ID NO. 1 through SEQ ID NO. 13, and wherein each of the one or more bacteriophage has specificity or cellular tropism for one or more strain of Bacillus sp., one or more strain of Hafnia sp., or one or more strain of Escherichia sp., present in, internal to, and/or associated with Varroa destructor that is associated with the beehive or with bees associated with the beehive.

2. The composition of claim 1, wherein the composition comprises two or more having respective genomes with respective nucleic acid sequences selected from the group consisting of SEQ ID NO. 1 through SEQ ID NO. 13, or having a genome with at least 70% sequence identity to one of SEQ ID NO. 1 through SEQ ID NO. 13, and wherein each of the two or more has specificity or cellular tropism for the one or more strain of Bacillus sp., the one or more strain of Hafnia sp., or the one or more strain of Escherichia sp., present in, internal to, and/or associated with the Varroa destructor associated with the beehive and/or the bees.

3. The composition of claim 2, wherein the respective bacteriophage each have or comprise, compared to other bacteriophage in the composition, (i) different host cell receptor specificity for attachment and/or (ii) less than or equal to 99% genomic sequence identity.

4. The composition of claim 1, wherein each of the one or more bacteriophage has a genome with a nucleic acid sequence having at least 75% sequence identity to one of SEQ ID NO. 1 through SEQ ID NO. 13.

5. The composition of claim 1, wherein each of the one or more bacteriophage is present in the composition at greater than or equal to about 1×10⁴ plaque forming units (PFU) per milliliter (PFU/mL) of the composition or greater than or equal to about 1×10⁴ PFU per milligram (PFU/mg) of the composition.

6. The composition of claim 1, wherein:
each of the one or more bacteriophage is lytic and/or has lytic activity against the one or more strain of Bacillus sp., the one or more strain of Hafnia sp., and the one or more strain of Escherichia sp., present in, internal to, and/or associated with Varroa destructor associated with the beehive and/or the bees; and/or
each of the one or more bacteriophage is not lysogenic and/or does not have lysogenic activity against the one or more strain of Bacillus sp., the one or more strain of Hafnia sp., and the one or more strain of Escherichia sp., present in, internal to, and/or associated with Varroa destructor associated with the beehive and/or the bees.

7. The composition of claim 1, wherein the carrier or excipient comprises a buffering solution.

8. The composition of claim 1, wherein applying or administering the composition to a beehive having Varroa destructor infestation, or to bees associated with the beehive, is effective to:
cause bacteriophage-induced death or lysis of one or more strain of Bacillus sp. and/or one or more strain of Hafnia sp., and/or one or more strain of Escherichia sp., present in, internal to, and/or associated with Varroa destructor associated with the beehive and/or the bees;
cause death of Varroa destructor associated with the beehive and/or the bees; and/or
inhibit reproduction, maturation, and/or growth in Varroa destructor or a population of Varroa destructor associated with the beehive and/or the bees.

9. A method of treating Varroa destructor infestation in a beehive, the method comprising applying or administering to a beehive having Varroa destructor infestation, or to bees associated with the beehive, the composition of claim 1.

10. The method of claim 9, wherein the step of applying or administering the composition to the beehive, or to the bees associated with the beehive, is effective to:
cause bacteriophage-induced death or lysis of one or more strain of Bacillus sp. and/or one or more strain of Hafnia sp., and/or one or more strain of Escherichia sp.) present in, internal to, and/or associated with Varroa destructor associated with the beehive and/or the bees; and/or
cause death of Varroa destructor associated with the beehive and/or the bees; and/or
inhibit reproduction, maturation, and/or growth in Varroa destructor or a population of Varroa destructor associated with the beehive and/or the bees.

11. A composition for use in treating Varroa destructor infestation in a beehive having Varroa destructor infestation, comprising:
a carrier or excipient; and
a bacteriophage cocktail comprising two or more sets of bacteriophage, selected from the group consisting of:
a first set of bacteriophage comprising one or more bacteriophage each having a genome with a nucleic acid sequence selected from the group consisting of SEQ ID NO. 1 through SEQ ID NO. 5, or having at least 70% sequence identity to one of SEQ ID NO. 1 through SEQ ID NO. 5, wherein each bacteriophage in the first set has specificity or cellular tropism for at least one strain of Bacillus sp.;
a second set of bacteriophage comprising one or more bacteriophage each having a genome with a nucleic acid sequence selected from the group consisting of SEQ ID NO. 6 through SEQ ID NO. 9, or having at least 70% sequence identity to one of SEQ ID NO. 6 through SEQ ID NO. 9, wherein each bacteriophage in the second set has specificity or cellular tropism for at least one strain of Hafnia sp.; and
a third set of bacteriophage comprising one or more bacteriophage each having a genome with a nucleic acid sequence selected from the group consisting of SEQ ID NO. 10 through SEQ ID NO. 13, or having at least 70% sequence identity to one of SEQ ID NO. 10 through SEQ ID NO. 13, wherein each bacteriophage in the third set has specificity or cellular tropism for at least one strain of Escherichia sp.

12. The composition of claim 11, wherein:
each of the one or more bacteriophage in the first set of bacteriophage has a genome with a nucleic acid sequence having at least 75% sequence identity to one of SEQ ID NO. 1 through SEQ ID NO. 5;
each of the one or more bacteriophage in the second set of bacteriophage has a genome with a nucleic acid sequence having at least 75% sequence identity to one of SEQ ID NO. 6 through SEQ ID NO. 9; and/or
each of the one or more bacteriophage in the third set of bacteriophage has a genome with a nucleic acid sequence having at least 75% sequence identity to one of SEQ ID NO. 10 through SEQ ID NO. 13.

13. The composition of claim 11, wherein the respective bacteriophage in each of the first set of bacteriophage, the second set of bacteriophage, and the third set of bacteriophage are each present in the composition at greater than or equal to about 1×10⁴ plaque forming units (PFU) per milliliter (PFU/mL) of the composition or greater than or equal to about 1×10⁴ PFU per milligram (PFU/mg) of the composition.

14. The composition of claim 11, wherein:
the respective bacteriophage in each of the first set of bacteriophage, the second set of bacteriophage, and the third set of bacteriophage are each lytic and/or have lytic activity against the one or more strain of Bacillus sp., the one or more strain of Hafnia sp., and the one or more strain of Escherichia sp., respectively; and/or
the respective bacteriophage in each of the first set of bacteriophage, the second set of bacteriophage, and the third set of bacteriophage are each lysogenic and/or do not have lysogenic activity against the one or more strain of Bacillus sp., the one or more strain of Hafnia sp., and the one or more strain of Escherichia sp., respectively.

15. The composition of claim 11, wherein the bacteriophage cocktail comprises the first set of bacteriophage, the second set of bacteriophage, and the third set of bacteriophage.

16. The composition of claim 11, wherein:
the first set of bacteriophage comprises two or more bacteriophage each having a genome with a nucleic acid sequence selected from the group consisting of SEQ ID NO. 1 through SEQ ID NO. 5, or having at least 70% sequence identity to one of SEQ ID NO. 1 through SEQ ID NO. 5, wherein each bacteriophage in the first set has specificity or cellular tropism for at least one strain of Bacillus sp.;
the second set of bacteriophage comprises two or more bacteriophage, each having a genome with a nucleic acid sequence selected from the group consisting of SEQ ID NO. 6 through SEQ ID NO. 9, or having at least 70% sequence identity to one of SEQ ID NO. 6 through SEQ ID NO. 9, wherein each bacteriophage in the second set has specificity or cellular tropism for at least one strain of Hafnia sp., and/or
the third set of bacteriophage comprises two or more bacteriophage each having a genome with a nucleic acid sequence selected from the group consisting of SEQ ID NO. 10 through SEQ ID NO. 13, or having at least 70% sequence identity to one of SEQ ID NO. 10 through SEQ ID NO. 13, wherein each bacteriophage in the third set has specificity or cellular tropism for at least one strain of Escherichia sp.

17. The composition of claim 16, wherein:
each of the two or more bacteriophage in the first set of bacteriophage has a genome with a nucleic acid sequence having at least 75% sequence identity to one of SEQ ID NO. 1 through SEQ ID NO. 5;
each of the two or more bacteriophage in the second set of bacteriophage has a genome with a nucleic acid sequence having at least 75% sequence identity to one of SEQ ID NO. 6 through SEQ ID NO. 9; and/or
each of the two or more bacteriophage in the third set of bacteriophage has a genome with a nucleic acid sequence having at least 75% sequence identity to one of SEQ ID NO. 10 through SEQ ID NO. 13.

18. The composition of claim 16, wherein:
the respective bacteriophage of the first set of bacteriophage each have or comprise, compared to other bacteriophage in the first set (i) different host cell receptor specificity for attachment and/or (ii) less than or equal to 99% genomic sequence identity;
the respective bacteriophage of the second set of bacteriophage each have or comprise, compared to other bacteriophage in the second set (i) different host cell receptor specificity for attachment and/or (ii) less than or equal to 99% genomic sequence identity; and
the respective bacteriophage of the third set of bacteriophage each have or comprise, compared to other bacteriophage in the third set (i) different host cell receptor specificity for attachment and/or (ii) less than or equal to 99% genomic sequence identity.

19. The composition of claim 11, wherein the carrier or excipient comprises a buffering solution.

20. The composition of claim 11, wherein applying or administering the composition to a beehive having Varroa destructor infestation, or to bees associated with the beehive, is effective to:
cause bacteriophage-induced death or lysis of one or more strain of Bacillus sp., one or more strain of Hafnia sp., and one or more strain of Escherichia sp., present in, internal to, and/or associated with Varroa destructor associated with the beehive and/or the bees; and/or
cause death of Varroa destructor associated with the beehive and/or the bees; and/or
inhibit reproduction, maturation, and/or growth in Varroa destructor or a population of Varroa destructor associated with the beehive and/or the bees.

21. A method of treating Varroa destructor infestation in a beehive, the method comprising applying or administering to a beehive having Varroa destructor infestation, or to bees associated with the beehive, the composition of claim 11.

22. The method of claim 21, wherein the step of applying or administering the composition to the beehive, or to the bees associated with the beehive, is effective to:
cause bacteriophage-induced death or lysis of two or more strains of bacteria present in, internal to, and/or associated with Varroa destructor associated with the beehive and/or the bees, the two or more strains selected from the group consisting of (i) one or more strain of Bacillus sp., (ii) one or more strain of Hafnia sp., and (iii) one or more strain of Escherichia sp.,
cause death of Varroa destructor associated with the beehive and/or the bees; and/or
inhibit reproduction, maturation, and/or growth in Varroa destructor or a population of Varroa destructor associated with the beehive and/or the bees.

23. A method of treating Varroa destructor infestation in a beehive, the method comprising applying or administering to a beehive having Varroa destructor infestation, or to bees associated with the beehive, a composition comprising:
a carrier or excipient;
one or more bacteriophage having specificity or cellular tropism for one or more strain of Bacillus sp., one or more strain of Hafnia sp., or one or more strain of Escherichia sp., present in, internal to, and/or associated with Varroa destructor associated with the beehive and/or the bees.

24. The method of claim 23, wherein the composition comprises two or more bacteriophage each having specificity or cellular tropism for one or more strain of bacteria selected from the group consisting of Bacillus sp., Hafnia sp., preferably and Escherichia sp., present in, internal to, and/or associated with Varroa destructor associated with the beehive and/or the bees.

25. The method of claim 23, wherein the composition comprises:
a first bacteriophage having specificity or cellular tropism for Bacillus sp.;
a second bacteriophage having specificity or cellular tropism for Hafnia sp.;
a third bacteriophage having specificity or cellular tropism for Escherichia sp.;
a first bacteriophage having specificity or cellular tropism for Bacillus sp. and a second bacteriophage having specificity or cellular tropism for Hafnia sp.;
a first bacteriophage having specificity or cellular tropism for Bacillus sp. and a third bacteriophage having specificity or cellular tropism for Escherichia sp.;
a second bacteriophage having specificity or cellular tropism for Hafnia sp., and a third bacteriophage having specificity or cellular tropism for Escherichia sp.; or
a first bacteriophage having specificity or cellular tropism for Bacillus sp. and a second bacteriophage having specificity or cellular tropism for Hafnia sp. and a third bacteriophage having specificity or cellular tropism for Escherichia sp.

26. The method of claim 23, wherein the composition comprises:
a first set of bacteriophage comprising two or more bacteriophage, preferably three or more bacteriophage, more preferably four or more bacteriophage, each having specificity or cellular tropism for Bacillus sp.;
a second set of bacteriophage comprising two or more bacteriophage, each having specificity or cellular tropism for Hafnia sp.; and/or
a third set of bacteriophage comprising two or more bacteriophage, each having specificity or cellular tropism for Escherichia sp.

27. A process of preparing a composition for use in treating Varroa destructor infestation in a beehive having Varroa destructor infestation, the process comprising the steps of:
obtaining one or more strains of bacteria from Varroa destructor mites, the one or more strains of bacteria selected from the group consisting of at least one strain of Bacillus sp., at least one strain of Hafnia sp., and at least one strain of Escherichia sp., wherein obtaining the one or more strains of bacteria comprises (i) isolating the Varroa destructor mites from the beehive, (ii) optionally sterilizing (the surface or exterior of) the Varroa destructor mites, by exposure to UV light, and/or (iii) disrupting or homogenizing the optionally sterilized Varroa destructor mites, by sterile mortar and pestle or bead-beating;
contacting the bacteria with a biological sample containing bacteriophage, the biological sample containing naturally-occurring bacteriophage, the biological sample comprising soil, plant material, sewage, or sewage water, and incubating the one or more strains of bacteria with the bacteriophage from the biological sample in an enrichment culture;
isolating enriched bacteriophage from the enrichment culture and purifying the isolated enriched bacteriophage to obtain one or more enriched bacteriophage strains, wherein the enriched bacteriophage are more numerous in the enrichment culture than in the biological sample;
characterizing the one or more enriched bacteriophage strains by:
sequencing respective genomes of each of the one or more enriched bacteriophage strains and selecting bacteriophage strains having a genome devoid of toxin genes, virulence factor genes, and/or integrase genes, and optionally determining a level of genomic redundancy between the one or more enriched bacteriophage strains;
measuring lytic activity of the one or more enriched bacteriophage strains and selecting bacteriophage strains that are lytic and/or not lysogenic; and/or
determining specificity or cellular tropism of the one or more enriched bacteriophage strains and selecting bacteriophage strains with specificity or cellular tropism for at least one of the one or more strains of bacteria from Varroa destructor mites, the at least one strain selected from the group consisting of a strain of Bacillus sp., a strain of Hafnia sp., and a strain of Escherichia sp.; and
combining one or more of the selected bacteriophage strains with a carrier or excipient.
